(19) United States
(12) Patent Application Publication
(10) Pub. No.: US 2020/0048359 A1
(43) Pub. Date: Feb. 13, 2020

(54) SHP INHIBITOR COMPOSITIONS AND USES FOR CHIMERIC ANTIGEN RECEPTOR THERAPY

(71) Applicants: Novartis AG, Basel (CH); The Trustees of the University of Pennsylvania, Philadelphia, PA (US)

(72) Inventors: Steven M. Albelda, Philadelphia, PA (US); Edmund K. Moon, Bryn Mawr, PA (US)

(21) Appl. No.: 16/489,018

(22) PCT Filed: Feb. 28, 2018
(86) PCT No.: PCT/US2018/020275

§ 371 Date: Aug. 27, 2019

Related U.S. Application Data
(60) Provisional application No. 62/500,806, filed on May 3, 2017.
(60) Provisional application No. 62/464,944, filed on Feb. 28, 2017.

(51) Int. Cl. C07K 16/30; A61K 35/17; C12N 5/0783; C12N 9/16; C07K 14/705; A61P 35/00; A61K 45/06; C12N 15/113; A61K 31/7088; C12N 15/11; C12N 9/22; A61K 38/46; A61K 31/713

(52) U.S. Cl. CPC C07K 16/30; A61K 2039/505; C12N 5/0636; C12N 9/16; C12Y 301/03048; C07K 14/70521; A61P 35/00; A61K 45/06; C12N 15/1138; A61K 31/7088; C12N 15/11; C12N 9/22; A61K 38/465; A61K 31/713; A61K 35/17

(57) ABSTRACT

Compositions and methods for treating diseases associated with expression of a cancer associated antigen are disclosed. The invention also relates to chimeric antigen receptor (CAR) specific to a cancer associated antigen as described herein, SHP inhibitory molecules, vectors encoding the same, and recombinant immune effector cells comprising the CARs and SHP inhibitory molecules. Methods of administering a genetically modified immune effector cell expressing a CAR that comprises an antigen binding domain that binds to a cancer associated antigen and a SHP inhibitory polypeptide are also disclosed.

### RELATED APPLICATION

[0001] This application claims priority to U.S. Ser. No. 62/464,944 filed Feb. 28, 2017 and U.S. Ser. No. 62/500,806 filed May 3, 2017, the content of each of which is incorporated herein by reference in its entirety.

### SEQUENCE LISTING

[0002] The instant application contains a Sequence Listing which has been submitted electronically in ASCII format and is hereby incorporated by reference in its entirety. Said ASCII copy, created on Feb. 27, 2018, is named N2067-7118WO_SL.txt and is 1,566,610 bytes in size.

### FIELD OF THE INVENTION

[0003] The present invention relates generally to compositions and uses of immune effector cells (e.g., T cells, NK cells) engineered to express a Chimeric Antigen Receptor (CAR) to treat a disease associated with expression of a tumor antigen.

### BACKGROUND OF THE INVENTION

[0004] Adoptive cell transfer (ACT) therapy with autologous T-cells, especially with T-cells transduced with Chimeric Antigen Receptors (CARs), has shown promise in cancer clinical trials. Although CAR technology has demonstrated tremendous success in eliminating hematologic tumors, the need exists for decreasing the effect of immunosuppressive factors that exist with the microenvironment of solid tumors that reduce the activity of CAR T cells.

[0005] One type of immunosuppression that has received much attention in the field of cancer immunotherapy relates to inhibitory receptors (IRs), or checkpoint molecules (Pardoll D M. Nat Rev Cancer April; 12(4):252-64). Examples of IRs include PD-1 (programmed death 1), CTLA-4 (cytotoxic T-lymphocyte associated protein 4), Tim-3 (T-cell immunoglobulin and mucin-domain containing-3), and Lag-3 (lymphocyte activation gene-3). IRs were initially described in naturally occurring tumor infiltrating lymphocytes (TILs) or in chronic viral infections, but are known to also play a role in the suppression of CAR and TCR-engineered T cells upon infiltration into solid tumors (Moon E K et al. Clin Cancer Res August 15; 20(16):4262-73; Moon E K et al. Clin Cancer Res. 2016 Jan. 15; 22(2):436-47). Checkpoint blockade with antibodies against IRs has demonstrated success in some settings (Moon et al. 2016 supra; Topalian S L et al. N Engl J Med June 28; 366(26):2443-54; Woo S R, Turnis M E, Goldberg M V, Bankoti J, Selby M, Nirschl C J, et al. Cancer Res February 15; 72(4):917-27).

[0006] Accordingly, the need exists to develop CAR therapies that address the immunosuppressive effects of the cancer microenvironment, including CAR therapies that reduce the effects of multiple IRs simultaneously.

### SUMMARY OF THE INVENTION

[0007] The present invention pertains, at least in part, to compositions and uses that improve an activity (e.g., one or more of function, persistence, cancer killing effect, or tumor infiltration) of an immune effector cell, e.g., a population of immune effector cells (e.g., T cells, NK cells). In some embodiments, the immune effector cell expresses a Chimeric Antigen Receptor molecule (e.g., a CAR polypeptide) that binds to a tumor antigen. In some embodiments, the immune effector cell comprises, or is contacted with an inhibitor of a Src homology region 2 domain-containing phosphatase (SHP). In one embodiment, the inhibitor is an inhibitor of SHP-1. In another embodiment, the inhibitor is an inhibitor of SHP-2. In one embodiment, the SHP inhibitor interferes with SHP signaling (e.g., interferes with SHP-1 signaling or SHP-2 signaling, or both), also referred to herein as an SHP inhibitor molecule (e.g., an SHP inhibitor polypeptide). Without wishing to be bound by theory, SHP inhibition is expected to interfere with the signaling of immunosuppressive factors, such as inhibitory receptors (IRs), or checkpoint molecules. In certain embodiments, the IRs present in the microenvironment of a tumor, e.g., a solid tumor can result in decreased effectiveness of a therapy, e.g., a CAR therapy.

[0008] In some embodiments, the SHP inhibitor is a dominant negative molecule that interferes with SHP signaling in a cell, e.g., an immune effector cell, e.g., an immune effector cell that expresses a CAR molecule (e.g., a CAR polypeptide) that binds to a tumor antigen. The SHP inhibitor can reduce the effects of multiple IRs simultaneously by inhibiting a signaling component of multiple IR pathways. In some embodiments, the SHP inhibitor molecule includes a mutation in the N-terminal region of the SHP, e.g., the N-SH2 region of an SHP, e.g., an SHP-1 or SHP-2. In some embodiments, the mutation is in the binding region of the N-SH2 region for an Immunoreceptor Tyrosine-based Inhibitory Motif (ITIM), e.g., an ITIM-domain present in an IR, e.g., PD-1. In some embodiments, the N-SH2 mutation is at position 30 of SHP-1, e.g., an R30K substitution in SHP-1 as described herein. Alternatively or in combination with the N-SH2 region mutation, the SHP inhibitor has a mutation in, e.g., a deletion of, part or all of the catalytic domain, e.g., the phosphatase domain, of an SHP, e.g., an SHP-1 or SHP-2. In embodiments, the SHP-inhibitor interferes with the IR-signaling pathway. For example, the SHP inhibitor molecules described herein, when expressed in an immune effector cell, e.g., a CAR-expressing immune effector cell, result in one or more of: (i) reduced immune checkpoint inhibition, e.g., IR inhibitor, (ii) reduced IR signaling, e.g., PD-1/PD-L1 signaling, (iii) increased levels of CD3z phosphorylation, (iv) increased levels of LAT phosphorylation, (v) increased phosphorylation of Lck, (vi) increased phosphorylation of ZAP70, (vii) increased expression of a cytokine, e.g., IFNγ or IL2, (viii) increased CAR and/or TCR signaling, (ix) increased killing of a tumor cell, e.g., a solid tumor cell, via a CAR molecule, in vitro and in vivo, e.g., compared to an otherwise similar cell that lacks the SHP inhibitor molecule. Accordingly, disclosed herein are, inter alia, nucleic acid compositions encoding the aforesaid SHP inhibitor polypeptides with or without a CAR molecule, immune effector cells comprising the nucleic acid compositions, vectors, as well as methods for making and using, e.g., in a CAR therapy, the aforesaid compositions.

[0009] Accordingly, in one aspect, the invention pertains to a nucleic acid composition comprising:

[0010] (a) a nucleic acid molecule encoding a chimeric antigen receptor (CAR) molecule, e.g., a CAR polypeptide; and

[0011] (b) a nucleic acid molecule encoding an SHP inhibitor molecule, e.g., an SHP polypeptide, wherein said SHP inhibitor polypeptide comprises a mutation (e.g., one or more deletions or substitutions) in an SHP polypeptide (e.g., an SHP-1 polypeptide of SEQ ID NO:1, or an SHP-2 polypeptide of SEQ ID NO:2).

[0012] In another aspect, the invention pertains to a polypeptide comprising a CAR polypeptide and a SHP inhibitor polypeptide, e.g., as described herein. In some embodiments, the polypeptide a peptide cleavage site disposed between the CAR polypeptide and the SHP inhibitor polypeptide. In some embodiments, the SHP inhibitor polypeptide comprises a mutation (e.g., one or more deletions or substitutions) in an SHP polypeptide (e.g., an SHP-1 polypeptide of SEQ ID NO:1, or an SHP-2 polypeptide of SEQ ID NO:2. In some embodiments, the peptide cleavage site is a T2A site. In some embodiments, the peptide cleavage site is a P2A site.

[0013] In some embodiments, the SHP inhibitor polypeptide of any nucleic acid composition or polypeptide disclosed herein comprises one, two or all of the following:

[0014] (i) a mutation (e.g., one or more deletions or substitutions) in an SH2 domain, e.g., an N-terminal SH2 domain or a C-terminal SH2 domain, or both, e.g., of an SHP polypeptide;

[0015] (ii) a mutation (e.g., one or more deletions or substitutions) in an ITIM-binding region of an SHP polypeptide (e.g., an ITIM-binding region of an SH2 domain, e.g., an ITIM-binding region of the N-terminal SH2 domain), or

[0016] (iii) a mutation (e.g., one or more deletions or substitutions) in a catalytic domain, e.g., the phosphatase domain of an SHP polypeptide.

[0017] In other embodiments, the SHP inhibitor polypeptide comprises the following:

[0018] (i) a mutation (e.g., one or more deletions or substitutions) in an ITIM-binding region of an SHP polypeptide (e.g., an ITIM-binding region of an SH2 domain, e.g., an ITIM-binding region of the N-terminal SH2 domain) of an SHP polypeptide, and

[0019] (ii) a mutation (e.g., one or more deletions or substitutions) in a catalytic domain, e.g., the phosphatase domain of an SHP polypeptide.

[0020] In some embodiments, the CAR polypeptide is a CAR polypeptide as described herein, e.g., comprises an antigen binding domain, a transmembrane domain, and an intracellular domain as described herein.

### SHP Inhibitor Molecules

[0021] Additional features or embodiments of the SHP inhibitor molecules, e.g., SHP inhibitor polypeptide as used herein, e.g., in the context of the nucleic acid compositions, polypeptides, vectors, immune effector cells, methods of use or making, include one or more of the following:

[0022] In some embodiments, the SHP inhibitor polypeptide has reduced binding, compared to a wild-type SHP, to an ITIM domain, e.g., an ITIM domain from one or more of the following proteins: PD-1, PDCD1, BTLA4, LILRB1, LAIR1, CTLA-4, KIR2DL 1, KIR2DL4, KIR2DL5, KIR3DL 1 or KIR3DL3.

[0023] In some embodiments, the binding of the SHP inhibitor polypeptide to the ITIM domain is reduced by at least 10%, 20%, 30%, 40%, 50%, 60%, 70%, 80%, 90%, 95%, 97%, or 99% compared to a wild-type SHP.

[0024] In some embodiments, the SHP inhibitor polypeptide (e.g., SHP-1 inhibitor polypeptide or SHP-2 polypeptide) is less than 240, 220, 180, 160, 140, 120, 100, 80, 60, or 40 amino acids in length.

[0025] In some embodiments, the SHP inhibitor polypeptide (e.g., SHP-1 inhibitor polypeptide) comprises amino acids 1-240, 1-220, 1-180, 1-160, 1-140, 1-120, 1-100, 1-80, 1-60, or 1-40 amino acids of SEQ ID NO: 1, or an amino acid sequence substantially identical thereto, e.g., at least 90%, 95%, 97%, 98%, or 99% identical thereto.

[0026] In some embodiments, the SHP inhibitor polypeptide (e.g., SHP-1 inhibitor polypeptide) comprises an N-terminal SH2 domain, e.g., corresponding to about amino acid 4 to about 100, of SEQ ID NO:1; or the C-terminal SH2 domain, e.g., corresponding to about amino acid 110 to about 213, of SEQ ID NO:1, or both, or an amino acid sequence substantially identical thereto, e.g., at least 90%, 95%, 97%, 98%, or 99% identical thereto.

[0027] In some embodiments, the SHP inhibitor polypeptide (e.g., SHP-1 inhibitor polypeptide) comprises an amino acid sequence at least 90%, 95%, 97%, 98%, or 99% identical to SEQ ID NO: 3, wherein X is any amino acid except R.

[0028] In some embodiments, the SHP inhibitor polypeptide (e.g., SHP-1 inhibitor polypeptide) comprises an amino acid sequence at least 90%, 95%, 97%, 98%, or 99% identical to SEQ ID NO: 3, wherein X is K or H.

[0029] In some embodiments, the SHP inhibitor polypeptide (e.g., SHP-1 inhibitor polypeptide) comprises an amino acid sequence at least 90%, 95%, 97%, 98%, or 99% identical to SEQ ID NO: 3, wherein X is K.

[0030] In some embodiments, the SHP inhibitor polypeptide (e.g., SHP-1 inhibitor polypeptide) comprises or consists of the amino acid sequence according to SEQ ID NO: 3, wherein X is any amino acid except R.

[0031] In some embodiments, the SHP inhibitor polypeptide (e.g., SHP-1 inhibitor polypeptide) comprises or consists of the amino acid sequence according to SEQ ID NO: 3, wherein X is K or H.

[0032] In some embodiments, the SHP inhibitor polypeptide (e.g., SHP-1 inhibitor polypeptide) comprises or consists of the amino acid sequence according to SEQ ID NO: 3, wherein X is K.

[0033] In some embodiments, the SHP inhibitor polypeptide (e.g., SHP-1 inhibitor polypeptide) comprises the amino acid sequence of SEQ ID NO: 1 or SEQ ID NO: 3, or an amino acid sequence at least 90%, 95%, 97%, 98%, or 99% identical to SEQ ID NO: 1 or 3, wherein the R at position 33 is substituted with any amino acid except R.

[0034] In some embodiments, the SHP inhibitor polypeptide (e.g., SHP-1 inhibitor polypeptide) comprises the amino acid sequence of SEQ ID NO: 1 or SEQ ID NO: 3, or an amino acid sequence at least 90%, 95%, 97%, 98%, or 99% identical to SEQ ID NO: 1 or 3, wherein the R at position 33 is substituted with glutamic acid (E).

[0035] In some embodiments, the SHP inhibitor polypeptide (e.g., SHP-1 inhibitor polypeptide) comprises the amino acid sequence of SEQ ID NO: 1, or an amino acid sequence at least 90%, 95%, 97%, 98%, or 99% identical to SEQ ID NO: 1, wherein the R at position 136 is substituted with any amino acid except R.

[0036] In some embodiments, the SHP inhibitor polypeptide (e.g., SHP-1 inhibitor polypeptide) comprises the amino acid sequence of SEQ ID NO: 1, or an amino acid sequence at least 90%, 95%, 97%, 98%, or 99% identical to SEQ ID NO: 1, wherein the R at position 136 is substituted with lysine (K).

[0037] In some embodiments, the SHP inhibitor polypeptide (e.g., SHP-1 inhibitor polypeptide) comprises the amino acid sequence of SEQ ID NO: 1, or an amino acid sequence at least 90%, 95%, 97%, 98%, or 99% identical to SEQ ID NO: 1, wherein the C at position 453 is substituted with any amino acid except C.

[0038] In some embodiments, the SHP inhibitor polypeptide (e.g., SHP-1 inhibitor polypeptide) comprises the amino acid sequence of SEQ ID NO: 1, or an amino acid sequence at least 90%, 95%, 97%, 98%, or 99% identical to SEQ ID NO: 1, wherein the C at position 453 is substituted with serine (S).

[0039] In some embodiments, the SHP inhibitor polypeptide (e.g., SHP-1 inhibitor polypeptide) comprises the amino acid sequence of SEQ ID NO: 1, or an amino acid sequence at least 90%, 95%, 97%, 98%, or 99% identical to SEQ ID NO: 1, wherein the R at position 459 is substituted with any amino acid except R.

[0040] In some embodiments, the SHP inhibitor polypeptide (e.g., SHP-1 inhibitor polypeptide) comprises the amino acid sequence of SEQ ID NO: 1, or an amino acid sequence at least 90%, 95%, 97%, 98%, or 99% identical to SEQ ID NO: 1, wherein the R at position 459 is substituted with methionine (M).

[0041] In some embodiments, the SHP inhibitor polypeptide (e.g., SHP-1 inhibitor polypeptide) comprises the amino acid sequence of SEQ ID NO: 1, or an amino acid sequence at least 90%, 95%, 97%, 98%, or 99% identical to SEQ ID NO: 1, wherein one, two, three or more of the R at position 30, the R at position 33, the R at position 136, the C at position 453, and the R at position 459 is substituted with an amino acid other than that specified by SEQ ID NO: 1 at that position.

[0042] In some embodiments, the SHP inhibitor polypeptide (e.g., SHP-2 inhibitor polypeptide) comprises amino acids 1-240, 1-220, 1-180, 1-160, 1-140, 1-120, 1-100, 1-80, 1-60, or 1-40 amino acids of SEQ ID NO: 2, or an amino acid sequence substantially identical thereto, e.g., at least 90%, 95%, 97%, 98%, or 99% identical thereto.

[0043] In some embodiments, the SHP inhibitor polypeptide (e.g., SHP-2 inhibitor polypeptide) comprises a sequence at least 90%, 95%, 97%, 98%, or 99% identical to SEQ ID NO: 4, wherein X is any amino acid except R.

[0044] In some embodiments, the SHP inhibitor polypeptide (e.g., SHP-2 inhibitor polypeptide) comprises a sequence at least 90%, 95%, 97%, 98%, or 99% identical to SEQ ID NO: 4, wherein X is K or H.

[0045] In some embodiments, the SHP inhibitor polypeptide (e.g., SHP-2 inhibitor polypeptide) comprises a sequence at least 90%, 95%, 97%, 98%, or 99% identical to SEQ ID NO: 4, wherein X is K.

[0046] In some embodiments, the SHP inhibitor polypeptide (e.g., SHP-2 inhibitor polypeptide) comprises or consists of a sequence according to SEQ ID NO: 4, wherein X is any amino acid except R.

[0047] In some embodiments, the SHP inhibitor polypeptide (e.g., SHP-2 inhibitor polypeptide) comprises or consists of a sequence according to SEQ ID NO: 4, wherein X is K or H.

[0048] In some embodiments, the SHP inhibitor polypeptide (e.g., SHP-2 inhibitor polypeptide) comprises or consists of a sequence according to SEQ ID NO: 4, wherein X is K.

[0049] In some embodiments, the SHP inhibitor polypeptide has reduced phosphatase activity, compared to wild-type SHP, to one or more SHP substrates (e.g., substrates comprising phosphorylated tyrosine).

[0050] In some embodiments, the SHP inhibitor polypeptide has a deletion of at least part or all of the phosphatase domain.

[0051] In some embodiments, the SHP inhibitor polypeptide lacks its phosphatase domain.

[0052] In some embodiments, the SHP inhibitor polypeptide, when expressed in an immune effector cell (e.g., a T cell), results in one or more of:
[0053] (i) increased CAR signaling;
[0054] (ii) increased TCR signaling;
[0055] (iii) reduced immune checkpoint inhibition;
[0056] (iv) reduced PD-1/PD-L1 signaling;
[0057] (v) increased levels of CD3z phosphorylation;
[0058] (vi) increased levels of LAT phosphorylation;
[0059] (vii) increased phosphorylation of Lck;
[0060] (viii) increased phosphorylation of ZAP70;
[0061] (ix) increased expression of a cytokine, e.g., IFNγ or IL2, or a combination of two, three, four, five, six or all of (i)-(ix), e.g., compared to an otherwise similar cell that lacks the SHP inhibitor polypeptide.

[0062] In some embodiments, the SHP inhibitor polypeptide, when expressed in an immune effector cell (e.g., a T cell), does not result (e.g., does not substantially result, e.g., results in less than 10%, 9%, 8%, 7%, 6%, 5% or less change) in one of more of the following:
[0063] (i) inhibition of CAR signalling;
[0064] (ii) inhibition of TCR signaling;
[0065] (iii) promotion of immune checkpoint inhibition,
[0066] (iv) promotion of PD-1/PD-L1 signalling;
[0067] (v) inhibition of phosphorylation of CD3z;
[0068] (vi) inhibition of LAT (linker for activation of T cells) phosphorylation,
[0069] (vii) dephosphorylation of Lck (lymphocyte-specific protein tyrosine kinase), or a combination of two, three, four, five, six or all of (i)-(vii), e.g., compared to an otherwise similar cell that lacks the SHP inhibitor polypeptide.

[0070] In some embodiments, the SHP inhibitor polypeptide, when expressed in an immune effector cell (e.g., a T cell) that also expresses a CAR polypeptide (e.g., an immune effector cell that expresses PD-1), results in increased cytokine secretion and/or increases the percentage of cytokine-expressing cells, wherein the cytokine is optionally IL-2, compared to an otherwise similar cell lacking the SHP inhibitor polypeptide or an otherwise similar cell comprising a SHP inhibitor polypeptide according to amino acids 1-100 of SEQ ID NO: 1, e.g., as shown in FIG. 10.

[0071] In some embodiments, cytokine secretion is increased by at least 2, 3, 4, 5, 6, 8, 10, 12, 14, 16, 18, or 20-fold.

[0072] In some embodiments, the SHP inhibitor polypeptide, when expressed in an immune effector cell (e.g., a T cell) that also expresses a CAR polypeptide (e.g., an immune effector cell that expresses PD-1), results in increased lysis, e.g., in vitro, of cancer cells that express PD-L1 and an antigen recognized by the CAR polypeptide, compared to an otherwise similar cell that lacks the SHP inhibitor polypeptide or an otherwise similar cell comprising a SHP inhibitor polypeptide according to amino acids 1-100 of SEQ ID NO: 1, e.g., as shown in FIG. 11.

[0073] In some embodiments, cancer cell lysis is increased at least 1.1-fold, 1.2-fold, 1.4-fold, 1.6-fold, 1.8-fold, or 2-fold compared to cancer cell lysis in response to an otherwise similar cell that lacks the SHP inhibitor polypeptide or an otherwise similar cell comprising a SHP inhibitor polypeptide according to amino acids 1-100 of SEQ ID NO: 1, e.g., as shown in FIG. 11.

[0074] In some embodiments, the SHP inhibitor polypeptide, when expressed in an immune effector cell (e.g., a T cell) that also expresses a CAR polypeptide (e.g., an immune effector cell that expresses PD-1), results in decreased tumor volume (e.g., of a tumor having cells expressing PD-L1 and an antigen recognized by the CAR polypeptide), e.g., in a mouse model, compared to an otherwise similar animal treated with otherwise similar immune effector cells that that lack the SHP inhibitor polypeptide or an otherwise similar cell comprising a SHP inhibitor polypeptide according to amino acids 1-100 of SEQ ID NO: 1, e.g., as shown in FIG. 12.

[0075] In some embodiments, the tumor volume is less by about 10%, 20%, 30%, 40%, 50%, 60%, 70%, 80%, or 90% than the tumor volume at the same timepoint in the presence of an otherwise similar cell that lacks the SHP inhibitor polypeptide or an otherwise similar cell comprising a SHP inhibitor polypeptide according to amino acids 1-100 of SEQ ID NO: 1, e.g., as shown in FIG. 12.

[0076] In some embodiments, the SHP inhibitor polypeptide, when expressed in an immune effector cell (e.g., a T cell) that also expresses a CAR polypeptide (e.g., an immune effector cell that expresses PD-1), results in increased T lymphocyte infiltration into a tumor, e.g., in a mouse model, compared to an otherwise similar animal treated with otherwise similar immune effector cells that that lack the SHP inhibitor polypeptide or an otherwise similar cell comprising a SHP inhibitor polypeptide according to amino acids 1-100 of SEQ ID NO: 1, e.g., as shown in FIG. 13.

[0077] In some embodiments, T lymphocyte infiltration is increased at least 1.1-fold, 1.2-fold, 1.4-fold, 1.6-fold, 1.8-fold, 2-fold, 3-fold, 4-fold, or 5-fold and/or wherein infiltrating T lymphocytes represent at least about 10%, 20%, 30%, 40%, or 50% of cells in the tumor.

[0078] In some embodiments, the SHP inhibitor polypeptide, when expressed in an immune effector cell (e.g., a T cell) that also expresses a CAR polypeptide, results in increased phosphorylation of ZAP70, e.g., in the presence of PD-L1-expressing tumor cells, compared to an otherwise similar immune effector cell that lacks the SHP inhibitor polypeptide or an otherwise similar cell comprising a wild type SHP polypeptide, or a wild type SH2-N terminal fragment thereof according to amino acids 1-100 of SEQ ID NO: 1, e.g., as shown in FIG. 16B.

[0079] In some embodiments, the SHP inhibitor polypeptide, when expressed in an immune effector cell (e.g., a T cell) that also expresses a CAR polypeptide, results in increased expression of IFNγ or IL-2 (or increased percentage of IFNγ positive or IL-2 positive cells), e.g., in the presence of PD-L1-expressing tumor cells, compared to an otherwise similar immune effector cell that lacks the SHP inhibitor polypeptide or an otherwise similar cell comprising a wild type SHP polypeptide, or a wild type SH2-N terminal fragment thereof according to amino acids 1-100 of SEQ ID NO: 1, e.g., as shown in FIG. 17.

[0080] In some embodiments, the nucleic acid composition comprises:

[0081] (a) a nucleic acid molecule encoding a chimeric antigen receptor (CAR) polypeptide,

[0082] (b) a nucleic acid molecule encoding an SHP1 inhibitor polypeptide, wherein said SHP1 inhibitor polypeptide comprises:
[0083] (i) a mutation (e.g., one or more deletions or substitutions) in the ITIM-binding region (e.g., an SH2 domain, e.g., the N-terminal SH2 domain) of an SHP1 polypeptide, and
[0084] (ii) a mutation (e.g., one or more deletions or substitutions) in a catalytic domain e.g., the phosphatase domain, of an SHP1 polypeptide, and

[0085] (c) a nucleic acid molecule encoding an SHP2 inhibitor polypeptide, wherein said SHP2 inhibitor polypeptide comprises:
[0086] (i) a mutation (e.g., one or more deletions or substitutions) in the ITIM-binding region (e.g., an SH2 domain, e.g., the N-terminal SH2 domain) of an SHP2 polypeptide, and
[0087] (ii) a mutation (e.g., one or more deletions or substitutions) in a catalytic domain e.g., the phosphatase domain, of an SHP2 polypeptide.

[0088] In some embodiments, the SHP1 inhibitor polypeptide comprises or consists of the amino acid sequence of SEQ ID NO: 41 or 42 (or an amino acid sequence substantially identical thereto, e.g., at least 90%, 95%, 97%, 98%, or 99% identical thereto). In some embodiments, the SHP2 inhibitor polypeptide comprises or consists of the amino acid sequence of SEQ ID NO: 44 or 45 (or an amino acid sequence substantially identical thereto, e.g., at least 90%, 95%, 97%, 98%, or 99% identical thereto). In some embodiments, the SHP1 inhibitor polypeptide comprises or consists of the amino acid sequence of SEQ ID NO: 41 or 42, and the SHP2 inhibitor polypeptide comprises or consists of the amino acid sequence of SEQ ID NO: 44 or 45. In some embodiments, the SHP1 inhibitor polypeptide comprises or consists of the amino acid sequence of SEQ ID NO: 41 and the SHP2 inhibitor polypeptide comprises or consists of the amino acid sequence of SEQ ID NO: 44. In some embodiments, the SHP1 inhibitor polypeptide comprises or consists of the amino acid sequence of SEQ ID NO: 41 and the SHP2 inhibitor polypeptide comprises or consists of the amino acid sequence of SEQ ID NO: 45. In some embodiments, the SHP1 inhibitor polypeptide comprises or consists of the amino acid sequence of SEQ ID NO: 42 and the SHP2 inhibitor polypeptide comprises or consists of the amino acid sequence of SEQ ID NO: 44. In some embodiments, the SHP1 inhibitor polypeptide comprises or consists of the amino acid sequence of SEQ ID NO: 42 and the SHP2 inhibitor polypeptide comprises or consists of the amino acid sequence of SEQ ID NO: 45.

[0089] In some embodiments, the CAR polypeptide and SHP inhibitor polypeptide are encoded by a single nucleic acid molecule in the same frame and as a single polypeptide chain. In some embodiments, the nucleic acid molecule encoding the CAR polypeptide and the nucleic acid molecule encoding the SHP inhibitor polypeptide are separated by a nucleic acid sequence encoding T2A or P2A. In some embodiments, the nucleic acid molecule encoding the CAR polypeptide, the nucleic acid molecule encoding the SHP1 inhibitor polypeptide, and the nucleic acid molecule encoding the SHP2 inhibitor polypeptide are separated by a nucleic acid sequence encoding T2A or P2A.

### CAR Molecules

[0090] Additional features or embodiments of the CAR molecules (e.g., CAR-containing nucleic acids (e.g., nucleic acid encoding CAR polypeptides), or CAR polypeptides (e.g., encoded CAR polypeptides), as used herein), e.g., in the context of the nucleic acid compositions, polypeptides, vectors, immune effector cells, methods of use or making, include one or more of the following:

[0091] In some embodiments, the SHP inhibitor polypeptide is attached to the N-terminus of a CAR polypeptide or the C-terminus of said CAR polypeptide.

[0092] In some embodiments, the SHP inhibitor polypeptide and the CAR polypeptide are separated by one or more peptide cleavage sites. In some embodiments, said peptide cleavage site is an auto-cleavage site or a substrate for an intracellular protease. In some embodiments, said peptide cleavage site is a T2A site. In some embodiments, said peptide cleavage site is a P2A site. In some embodiments, the nucleic acid molecule encoding the CAR polypeptide and the nucleic acid molecule encoding the SHP inhibitor polypeptide are separated by a nucleic acid sequence encoding T2A or P2A. In some embodiments, the nucleic acid molecule encoding the CAR polypeptide, the nucleic acid molecule encoding the SHP1 inhibitor polypeptide, and the nucleic acid molecule encoding the SHP2 inhibitor polypeptide are separated by a nucleic acid sequence encoding T2A or P2A.

[0093] In some embodiments, said CAR polypeptide and said SHP inhibitor polypeptide are encoded by a single nucleic acid molecule and are not expressed as a single polypeptide.

[0094] In some embodiments, the expression of said CAR polypeptide and said SHP inhibitor polypeptide is controlled by a common promoter.

[0095] In some embodiments, the nucleic acid encoding said CAR polypeptide and the nucleic acid encoding said SHP inhibitor polypeptide are separated by an internal ribosomal entry site.

[0096] In some embodiments, the expression of said CAR polypeptide and said SHP inhibitor polypeptide is controlled by separate promoters.

[0097] In some embodiments, the nucleic acid composition described herein consists of a single isolated nucleic acid.

[0098] In some embodiments, the CAR molecule (e.g., the CAR polypeptide (e.g., the encoded CAR polypeptide) or a nucleic acid encoding the CAR), comprises an antigen binding domain, a transmembrane domain, and an intracellular signaling domain.

[0099] In some embodiments, the intracellular domain of the CAR molecule comprises a primary signaling domain, a costimulatory domain, or both of a primary signaling domain and a costimulatory domain.

[0100] In some embodiments, the primary signaling domain of the CAR molecule comprises a functional signaling domain of one or more proteins selected from the group consisting of CD3 zeta, CD3 gamma, CD3 delta, CD3 epsilon, common FcR gamma (FCER1G), FcR beta (Fc Epsilon R1b), CD79a, CD79b, Fcgamma RIIa, DAP10, and DAP12, or a functional variant thereof.

[0101] In some embodiments, the costimulatory domain of the CAR molecule comprises a functional domain of one or more proteins selected from the group consisting of CD27, CD28, 4-1BB (CD137), OX40, CD28-OX40, CD28-4-1BB, CD30, CD40, PD-1, ICOS, lymphocyte function-associated antigen-1 (LFA-1), CD2, CD7, LIGHT, NKG2C, B7-H3, a ligand that specifically binds with CD83, CD5, ICAM-1, GITR, BAFFR, HVEM (LIGHTR), SLAMF7, NKp80 (KLRF1), CD160, CD19, CD4, CD8alpha, CD8beta, IL2R beta, IL2R gamma, IL7R alpha, ITGA4, VLA1, CD49a, ITGA4, IA4, CD49D, ITGA6, VLA-6, CD49f, ITGAD, CD11d, ITGAE, CD103, ITGAL, CD11a, LFA-1, ITGAM, CD11b, ITGAX, CD11c, ITGB1, CD29, ITGB2, CD18, LFA-1, ITGB7, TNFR2, TRANCE/RANKL, DNAM1 (CD226), SLAMF4 (CD244, 2B4), CD84, CD96 (Tactile), CEACAM1, CRTAM, Ly9 (CD229), CD160 (BY55), PSGL1, CD100 (SEMA4D), CD69, SLAMF6 (NTB-A, Ly108), SLAM (SLAMF1, CD150, IPO-3), BLAME (SLAMF8), SELPLG (CD162), LTBR, LAT, GADS, SLP-76, PAG/Cbp, NKp44, NKp30, NKp46, and NKG2D, or a functional variant thereof.

[0102] In some embodiments, the antigen binding domain of the CAR molecule binds a tumor antigen. In some embodiments, the tumor antigen is selected from the group consisting of: CD19; CD123; CD22; CD30; CD171; CS-1 (also referred to as CD2 subset 1, CRACC, SLAMF7, CD319, and 19A24); C-type lectin-like molecule-1 (CLL-1 or CLECL1); CD33; epidermal growth factor receptor variant III (EGFRvIII); ganglioside G2 (GD2); ganglioside GD3 (aNeu5Ac(2-8)aNeu5Ac(2-3)bDGalp(1-4)bDGlcp(1-1)Cer); TNF receptor family member B cell maturation (BCMA); Tn antigen ((Tn Ag) or (GalNAcα-Ser/Thr)); prostate-specific membrane antigen (PSMA); Receptor tyrosine kinase-like orphan receptor 1 (ROR1); Fms-Like Tyrosine Kinase 3 (FLT3); Tumor-associated glycoprotein 72 (TAG72); CD38; CD44v6; Carcinoembryonic antigen (CEA); Epithelial cell adhesion molecule (EPCAM); B7H3 (CD276); KIT (CD117); Interleukin-13 receptor subunit alpha-2 (IL-13Ra2 or CD213A2); Mesothelin; Interleukin 11 receptor alpha (IL-11Ra); prostate stem cell antigen (PSCA); Protease Serine 21 (Testisin or PRSS21); vascular endothelial growth factor receptor 2 (VEGFR2); Lewis(Y) antigen; CD24; Platelet-derived growth factor receptor beta (PDGFR-beta); Stage-specific embryonic antigen-4 (SSEA-4); CD20; Folate receptor alpha; Receptor tyrosine-protein kinase ERBB2 (Her2/neu); Mucin 1, cell surface associated (MUC1); epidermal growth factor receptor (EGFR); neural cell adhesion molecule (NCAM); Prostase; prostatic acid phosphatase (PAP); elongation factor 2 mutated (ELF2M); Ephrin B2; fibroblast activation protein alpha (FAP); insulin-like growth factor 1 receptor (IGF-I receptor), carbonic anhydrase IX (CAIX); Proteasome (Prosome, Macropain) Subunit, Beta Type, 9 (LMP2); glycoprotein 100 (gp100); oncogene fusion protein consisting of breakpoint cluster region (BCR) and Abelson murine leukemia viral oncogene homolog 1 (Abl) (bcr-abl); tyrosinase; ephrin type-A receptor 2 (EphA2); Fucosyl GM1; sialyl Lewis adhesion molecule (sLe); ganglioside GM3 (aNeu5Ac(2-3)bDGalp(1-4)bDGlcp(1-1)Cer); transglutaminase 5 (TGS5); high molecular weight-melanoma-associated antigen (HMWMAA); o-acetyl-GD2 ganglioside (OAcGD2); Folate receptor beta; tumor endothelial marker 1 (TEM1/CD248); tumor endothelial marker 7-related (TEM7R); claudin 6 (CLDN6); thyroid stimulating hormone receptor (TSHR); G protein-coupled receptor class C group 5, member D (GPRC5D); chromosome X open reading frame 61 (CXORF61); CD97; CD179a; anaplastic lymphoma kinase (ALK); Polysialic acid; placenta-specific 1 (PLAC1); hexasaccharide portion of globoH glycoceramide (GloboH); mammary gland differentiation antigen (NY-BR-1); uroplakin 2 (UPK2); Hepatitis A virus cellular receptor 1 (HAVCR1); adrenoceptor beta 3 (ADRB3); pannexin 3 (PANX3); G protein-coupled receptor 20 (GPR20); lymphocyte antigen 6 complex, locus K 9 (LY6K); Olfactory receptor 51E2 (OR51E2); TCR Gamma Alternate Reading Frame Protein (TARP); Wilms tumor protein (WT1); Cancer/testis antigen 1 (NY-ESO-1); Cancer/testis antigen 2 (LAGE-1a); Melanoma-associated antigen 1 (MAGE-A1); ETS translocation-variant gene 6, located on chromosome 12p (ETV6-AML); sperm protein 17 (SPA17); X Antigen Family, Member 1A (XAGE1); angiopoietin-binding cell surface receptor 2 (Tie 2); melanoma cancer testis antigen-1 (MAD-CT-1); melanoma cancer testis antigen-2 (MAD-CT-2); Fos-related antigen 1; tumor protein p53 (p53); p53 mutant; prostein; survivin; telomerase; prostate carcinoma tumor antigen-1 (PCTA-1 or Galectin 8), melanoma antigen recognized by T cells 1 (MelanA or MART1); Rat sarcoma (Ras) mutant; human Telomerase reverse transcriptase (hTERT); sarcoma translocation breakpoints; melanoma inhibitor of apoptosis (ML-IAP); ERG (transmembrane protease, serine 2 (TMPRSS2) ETS fusion gene); N-Acetyl glucosaminyl-transferase V (NA17); paired box protein Pax-3 (PAX3); Androgen receptor; Cyclin B1; v-myc avian myelocytomatosis viral oncogene neuroblastoma derived homolog (MYCN); Ras Homolog Family Member C (RhoC); Tyrosinase-related protein 2 (TRP-2); Cytochrome P450 1B1 (CYP1B1); CCCTC-Binding Factor (Zinc Finger Protein)-Like (BORIS or Brother of the Regulator of Imprinted Sites), Squamous Cell Carcinoma Antigen Recognized By T Cells 3 (SART3); Paired box protein Pax-5 (PAX5); proacrosin binding protein sp32 (OY-TES1); lymphocyte-specific protein tyrosine kinase (LCK); A kinase anchor protein 4 (AKAP-4); synovial sarcoma, X breakpoint 2 (SSX2); Receptor for Advanced Glycation Endproducts (RAGE-1); renal ubiquitous 1 (RU1); renal ubiquitous 2 (RU2); legumain; human papilloma virus E6 (HPV E6); human papilloma virus E7 (HPV E7); intestinal carboxyl esterase; heat shock protein 70-2 mutated (mut hsp70-2); CD79a; CD79b; CD72; Leukocyte-associated immunoglobulin-like receptor 1 (LAIR1); Fc fragment of IgA receptor (FCAR or CD89); Leukocyte immunoglobulin-like receptor subfamily A member 2 (LILRA2); CD300 molecule-like family member f (CD300LF); C-type lectin domain family 12 member A (CLEC12A); bone marrow stromal cell antigen 2 (BST2); EGF-like module-containing mucin-like hormone receptor-like 2 (EMR2); lymphocyte antigen 75 (LY75); Glypican-3 (GPC3); Fc receptor-like 5 (FCRL5); and immunoglobulin lambda-like polypeptide 1 (IGLL1).

[0103] In some embodiments, the tumor antigen bound by the antigen binding domain of the CAR molecule is selected from CD150, 5T4, ActRIIA, B7, BMCA, CA-125, CCNA1, CD123, CD126, CD138, CD14, CD148, CD15, CD19, CD20, CD200, CD21, CD22, CD23, CD24, CD25, CD26, CD261, CD262, CD30, CD33, CD362, CD37, CD38, CD4, CD40, CD40L, CD44, CD46, CD5, CD52, CD53, CD54, CD56, CD66a-d, CD74, CD8, CD80, CD92, CE7, CS-1, CSPG4, ED-B fibronectin, EGFR, EGFRvIII, EGP-2, EGP-4, EPHa2, ErbB2, ErbB3, ErbB4, FBP, GD2, GD3, HER1-HER2 in combination, HER2-HER3 in combination, HERV-K, HIV-1 envelope glycoprotein gp120, HIV-1 envelope glycoprotein gp41, HLA-DR, HM1.24, HMW-MAA, Her2, Her2/neu, IGF-1R, IL-11Ralpha, IL-13R-alpha2, IL-2, IL-22R-alpha, IL-6, IL-6R, Ia, Ii, L1-CAM, L1-cell adhesion molecule, Lewis Y, L1-CAM, MAGE A3, MAGE-A1, MART-1, MUC1, NKG2C ligands, NKG2D Ligands, NY-ESO-1, OEPHa2, PIGF, PSCA, PSMA, ROR1, T101, TAC, TAG72, TIM-3, TRAIL-R1, TRAIL-R1 (DR4), TRAIL-R2 (DR5), VEGF, VEGFR2, WT-1, a G-protein coupled receptor, alphafetoprotein (AFP), an angiogenesis factor, an exogenous cognate binding molecule (ExoCBM), oncogene product, anti-folate receptor, c-Met, carcinoembryonic antigen (CEA), cyclin (D1), ephrinB2, epithelial tumor antigen, estrogen receptor, fetal acethycholine e receptor, folate binding protein, gp100, hepatitis B surface antigen, kappa chain, kappa light chain, kdr, lambda chain, livin, melanoma-associated antigen, mesothelin, mouse double minute 2 homolog (MDM2), mucin 16 (MUC16), mutated p53, mutated ras, necrosis antigens, oncofetal antigen, ROR2, progesterone receptor, prostate specific antigen, tEGFR, tenascin, β2-Microglobulin, Fc Receptor-like 5 (FcRL5), or molecules expressed by HIV, HCV, HBV, or other pathogens.

[0104] In some embodiments, the tumor antigen bound by the antigen binding domain of the CAR molecule is in a solid tumor antigen, e.g., mesothelin.

[0105] In some embodiments, the tumor antigen bound by the antigen binding domain of the CAR molecule is expressed in a solid tumor that also expresses an immune checkpoint inhibitor, e.g., PD-L1.

[0106] In some embodiments, the antigen binding domain of the antigen binding domain of the CAR molecule comprises an antibody, an antibody fragment, an scFv, a Fv, a Fab, a (Fab′)2, a single domain antibody (SDAB), a VH or VL domain, or a camelid VHH domain.

[0107] In some embodiments, the transmembrane domain of the CAR molecule comprises a transmembrane domain of a protein selected from the group consisting of the alpha, beta or zeta chain of the T-cell receptor, CD28, CD3 epsilon, CD45, CD4, CD5, CD8, CD9, CD16, CD22, CD33, CD37, CD64, CD80, CD86, CD134, CD137, CD154, KIRDS2, OX40, CD2, CD27, LFA-1 (CD11a, CD18), ICOS (CD278), 4-1BB (CD137), GITR, CD40, BAFFR, HVEM (LIGHTR), SLAMF7, NKp80 (KLRF1), CD160, CD19, IL2R beta, IL2R gamma, IL7Rα, ITGA1, VLA1, CD49a, ITGA4, IA4, CD49D, ITGA6, VLA-6, CD49f, ITGAD, CD11d, ITGAE, CD103, ITGAL, CD11a, LFA-1, ITGAM, CD11b, ITGAX, CD11c, ITGB1, CD29, ITGB2, CD18, LFA-1, ITGB7, TNFR2, DNAM1 (CD226), SLAMF4

[0108] (CD244, 2B4), CD84, CD96 (Tactile), CEACAM1, CRTAM, Ly9 (CD229), CD160 (BY55), PSGL1, CD100 (SEMA4D), SLAMF6 (NTB-A, Ly108), SLAM (SLAMF1, CD150, IPO-3), BLAME (SLAMF8), SELPLG (CD162), LTBR, PAG/Cbp, NKp44, NKp30, NKp46, NKG2D, and NKG2C, or a functional variant thereof.

[0109] In some embodiments, the antigen binding domain of the CAR molecule is connected to the transmembrane domain by a hinge region.

[0110] In some embodiments, one or both nucleic acid molecule(s) further encodes a leader sequence.

[0111] In some embodiments, one or both nucleic acid molecule(s) is DNA or RNA.

[0112] In another aspect, the invention pertains to a vector comprising a nucleic acid composition described herein, wherein the vector is selected from the group consisting of a DNA vector, an RNA vector, a plasmid, a lentivirus vector, adenoviral vector, or a retrovirus vector.

[0113] In some embodiments, the vector further comprises a promoter, e.g., wherein the promoter is chosen from an EF-1 promoter, a CMV IE gene promoter, an EF-1α promoter, an ubiquitin C promoter, or a phosphoglycerate kinase (PGK) promoter.

[0114] In some embodiments, the vector is an in vitro transcribed vector, or the vector further comprises a poly(A) tail or a 3′UTR.

### Immune Effector Cells

[0115] In another aspect, the invention pertains to an immune effector cell (e.g., a population of immune effector cells) comprising a CAR molecule, e.g., a CAR polypeptide, as described herein, and an SHP inhibitor molecule, e.g., an SHP inhibitor polypeptide, as described herein.

[0116] In another aspect, the invention pertains to an immune effector cell (e.g., a population of immune effector cells) comprising

[0117] (a) a CAR molecule, e.g., a CAR polypeptide and

[0118] (b) an SHP inhibitor molecule, e.g., SHP polypeptide, wherein said SHP inhibitor polypeptide comprises:
[0119] (i) a mutation (e.g., one or more deletions or substitutions) in the ITIM-binding region (e.g., an SH2 domain, e.g., the N-terminal SH2 domain) of the SHP inhibitor polypeptide, and
[0120] (ii) a mutation (e.g., one or more deletions or substitutions) in a catalytic domain e.g., the phosphatase domain.

[0121] In another aspect, the invention pertains to an immune effector cell (e.g., a population of immune effector cells), comprising

[0122] a nucleic acid composition described herein;

[0123] a vector described herein; or

[0124] a polypeptide described herein.

[0125] In some embodiments of any of the aforesaid immune effector cells, the immune effector cell is a human T cell (e.g., CD8+ T cell or CD4+ T cell) or a human NK cell, optionally, wherein the T cell is diacylglycerol kinase (DGK) and/or Ikaros deficient.

[0126] In some embodiments, the immune effector cell is derived from blood, cord blood, bone marrow, or iPSC.

[0127] In some embodiments, the immune effector cell comprises an immune checkpoint inhibitor, e.g., a receptor. In some embodiments, the checkpoint inhibitor is chosen from PD-1, PD-L1, LAG-3, TIM3, B7-H1, CD160, P1H, 2B4, CEACAM (e.g., CEACAM-1, CEACAM-3, and/or CEACAM-5), TIGIT, CTLA-4, BTLA, or LAIR1. In one embodiment, the checkpoint inhibitor is PD-1.

### Methods of Making and Using

[0128] In another aspect, the invention pertains to a method of making a CAR-expressing immune effector cell (e.g., a population of CAR-expressing immune effector cells), comprising introducing the nucleic acid composition described herein or a vector described herein, into an immune effector cell, under conditions such that the CAR polypeptide is expressed.

[0129] In some embodiments, the method of making a CAR-expressing immune effector cell further comprises:

[0130] (a) providing a population of immune effector cells (e.g., T cells or NK cells); and

[0131] (b) removing T regulatory cells from the population, thereby providing a population of T regulatory-depleted cells;

[0132] wherein steps (a) and (b) are performed prior to introducing the nucleic acid composition to the population.

[0133] In some embodiments, the T regulatory cells are removed from the cell population using an anti-CD25 antibody, or an anti-GITR antibody.

[0134] In another aspect, the invention pertains to a method of providing anti-tumor or anti-cancer cell, immunity in a subject comprising administering to the subject an effective amount of an immune effector cell described herein, e.g., wherein the cell is an autologous T cell or an allogeneic T cell, or an autologous NK cell or an allogeneic NK cell.

[0135] In another aspect, the invention pertains to a method of treating a subject having a disease (e.g., cancer) associated with expression of a tumor antigen. The method includes administering an effective amount of an SHP inhibitor, e.g., an SHP inhibitor molecule in an immune effector cell as described herein, to the subject, thereby treating the subject.

[0136] In some embodiments, the SHP inhibitor is sodium stibogluconate (SSG).

[0137] In other embodiments, the SHP inhibitor is an SHP molecule, e.g., SHP polypeptide, as described herein, in an immune effector cell, e.g., a CAR-expressing immune effector cells as described herein.

[0138] In some embodiments, the cancer cells comprise an immune checkpoint inhibitor, e.g., a ligand. In some embodiments, the checkpoint inhibitor is chosen from PD-1, PD-L1, LAG-3, TIM3, B7-H1, CD160, P1H, 2B4, CEACAM (e.g., CEACAM-1, CEACAM-3, and/or CEACAM-5), TIGIT, CTLA-4, BTLA, or LAIR1. In one embodiment, the checkpoint inhibitor is PD-L1.

[0139] In some embodiments, the method further comprises administering an agent that increases the efficacy of the immune effector cell, thereby treating the subject.

[0140] In some embodiments, said agent is chosen from one or more of:

[0141] a protein phosphatase inhibitor;

[0142] a kinase inhibitor;

[0143] a cytokine;

[0144] an inhibitor of an immune inhibitory molecule; or

[0145] an agent that decreases the level or activity of a T_{REG} cell.

[0146] In some embodiments, the disease associated with expression of the tumor antigen is selected from the group consisting of a proliferative disease, a precancerous condition, a cancer, and a non-cancer related indication associated with expression of the tumor antigen.

[0147] In some embodiments, the disease associated with expression of the tumor antigen is a solid tumor.

[0148] In some embodiments, the cancer is selected from the group consisting of colon cancer, rectal cancer, renal-cell carcinoma, liver cancer, non-small cell carcinoma of the lung, cancer of the small intestine, cancer of the esophagus, melanoma, bone cancer, pancreatic cancer, skin cancer, cancer of the head or neck, cutaneous or intraocular malignant melanoma, uterine cancer, ovarian cancer, rectal cancer, cancer of the anal region, stomach cancer, testicular cancer, uterine cancer, carcinoma of the fallopian tubes, carcinoma of the endometrium, carcinoma of the cervix, carcinoma of the vagina, carcinoma of the vulva, Hodgkin lymphoma, non-Hodgkin lymphoma, cancer of the endocrine system, cancer of the thyroid gland, cancer of the parathyroid gland, cancer of the adrenal gland, sarcoma of soft tissue, cancer of the urethra, cancer of the penis, solid tumors of childhood, cancer of the bladder, cancer of the kidney or ureter, carcinoma of the renal pelvis, neoplasm of the central nervous system (CNS), primary CNS lymphoma, tumor angiogenesis, spinal axis tumor, brain stem glioma, pituitary adenoma, Kaposi's sarcoma, epidermoid cancer, squamous cell cancer, T-cell lymphoma, environmentally induced cancers, combinations of said cancers, and metastatic lesions of said cancers.

[0149] In some embodiments, the cancer is a hematologic cancer chosen from one or more of chronic lymphocytic leukemia (CLL), acute leukemias, acute lymphoid leukemia (ALL), B-cell acute lymphoid leukemia (B-ALL), T-cell acute lymphoid leukemia (T-ALL), chronic myelogenous leukemia (CML), B cell prolymphocytic leukemia, blastic plasmacytoid dendritic cell neoplasm, Burkitt's lymphoma, diffuse large B cell lymphoma, follicular lymphoma, hairy cell leukemia, small cell- or a large cell-follicular lymphoma, malignant lymphoproliferative conditions, MALT lymphoma, mantle cell lymphoma, marginal zone lymphoma, multiple myeloma, myelodysplasia and myelodysplastic syndrome, non-Hodgkin lymphoma, Hodgkin lymphoma, plasmablastic lymphoma, plasmacytoid dendritic cell neoplasm, Waldenstrom macroglobulinemia, or pre-leukemia.

[0150] In another aspect, the invention pertains to a nucleic acid composition described herein, a vector described herein, a polypeptide described herein, or an immune effector cell described herein, for use as a medicament.

[0151] In another aspect, the invention pertains to a nucleic acid composition described herein, a vector described herein, a polypeptide described herein, or an immune effector cell described herein, for use in the treatment of a disease expressing a tumor antigen.

[0152] In one aspect, disclosed herein is a composition comprising:

[0153] (a) a nucleic acid molecule encoding a chimeric antigen receptor (CAR) polypeptide and

[0154] (b) an SHP inhibitor, wherein the SHP inhibitor is chosen from:
[0155] (i) one or more components of a gene editing system targeting one or more sites within a gene encoding SHP (e.g., SHP1 or SHP2) or a regulatory element thereof, a nucleic acid molecule encoding the one or more components of the gene editing system, or a combination thereof, or
[0156] (2) an agent that has RNAi or antisense inhibition activity against SHP (e.g., SHP1 or SHP2), or a nucleic acid molecule encoding the agent.

[0157] In some embodiments, the SHP inhibitor is one or more components of a gene editing system targeting one or more sites within a gene encoding SHP (e.g., SHP1 or SHP2) or a regulatory element thereof, a nucleic acid molecule encoding the one or more components of the gene editing system, or a combination thereof. In some embodiments, the gene editing system is chosen from a CRISPR/Cas9 system, a zinc finger nuclease system, a TALEN system, or a meganuclease system. In some embodiments, the gene editing system is a CRISPR/Cas9 system. In some embodiments, the gene editing system is a zinc finger nuclease system. In some embodiments, the gene editing system is a TALEN system. In some embodiments, the gene editing system is a meganuclease system.

[0158] In some embodiments, the SHP inhibitor comprises a guide RNA (gRNA) molecule targeting a gene encoding SHP (e.g., SHP1 or SHP2) or a regulatory element thereof. In some embodiments, the SHP inhibitor comprises a gRNA molecule targeting an exon of the gene encoding SHP (e.g., SHP1 or SHP2).

[0159] In some embodiments, the SHP inhibitor is an SHP2 inhibitor. In some embodiments, the SHP2 inhibitor comprises a gRNA molecule targeting any genomic location provided in column 4 of Table 19. In some embodiments, the SHP2 inhibitor comprises a gRNA molecule targeting any genomic target sequence provided in column 6 of Table 19, or a portion thereof.

[0160] In some embodiments, the SHP inhibitor is an SHP2 inhibitor, wherein the SHP2 inhibitor comprises a gRNA molecule comprising a tracr and a crRNA. In some embodiments, the crRNA comprises a targeting domain that is complementary with a target sequence of SHP2. In some embodiments, the targeting domain comprises any nucleotide sequence provided in column 5 of Table 19. In some embodiments, the targeting domain comprises or consists of 17, 18, 19, 20, 21, 22, 23, or 24 consecutive nucleic acids of any nucleotide sequence provided in column 5 of Table 19. In some embodiments, the 17, 18, 19, 20, 21, 22, 23, or 24 consecutive nucleic acids of any nucleotide sequence provided in column 5 of Table 19 are the 17, 18, 19, 20, 21, 22, 23, or 24 consecutive nucleic acids disposed at the 3′ end of the recited nucleotide sequence provided in column 5 of Table 19. In some embodiments, the 17, 18, 19, 20, 21, 22, 23, or 24 consecutive nucleic acids of any nucleotide sequence provided in column 5 of Table 19 are the 17, 18, 19, 20, 21, 22, 23, or 24 consecutive nucleic acids disposed at the 5′ end of the recited nucleotide sequence provided in column 5 of Table 19. In some embodiments, the 17, 18, 19, 20, 21, 22, 23, or 24 consecutive nucleic acids of any nucleotide sequence provided in column 5 of Table 19 do not comprise either the 5′ or 3′ nucleic acid of the recited nucleotide sequence provided in column 5 of Table 19.

[0161] In some embodiments, the SHP inhibitor is an agent that has RNAi or antisense inhibition activity against SHP (e.g., SHP1 or SHP2), or a nucleic acid molecule encoding the agent. In some embodiments, the SHP inhibitor is an agent that mediates RNA interference, e.g., an siRNA or shRNA specific for a gene encoding SHP (e.g., SHP1 or SHP2), or a nucleic acid molecule encoding the siRNA or shRNA.

[0162] In some embodiments, the encoded CAR polypeptide comprises an antigen binding domain, a transmembrane domain, and an intracellular signaling domain. In some embodiments, the intracellular domain comprises a primary signaling domain, a costimulatory domain, or both of a primary signaling domain and a costimulatory domain. In some embodiments, the primary signaling domain comprises a functional signaling domain of one or more proteins selected from the group consisting of CD3 zeta, CD3 gamma, CD3 delta, CD3 epsilon, common FcR gamma (FCER1G), FcR beta (Fc Epsilon R1b), CD79a, CD79b, Fcgamma RIIa, DAP10, and DAP12, or a functional variant thereof. In some embodiments, the costimulatory domain comprises a functional domain of one or more proteins selected from the group consisting of CD27, CD28, 4-1BB (CD137), OX40, CD28-OX40, CD28-4-1BB, CD30, CD40, PD-1, ICOS, lymphocyte function-associated antigen-1 (LFA-1), CD2, CD7, LIGHT, NKG2C, B7-H3, a ligand that specifically binds with CD83, CD5, ICAM-1, GITR, BAFFR, HVEM (LIGHTR), SLAMF7, NKp80 (KLRF1), CD160, CD19, CD4, CD8alpha, CD8beta, IL2R beta, IL2R gamma, IL7R alpha, ITGA4, VLA1, CD49a, ITGA4, IA4, CD49D, ITGA6, VLA-6, CD49f, ITGAD, CD11d, ITGAE, CD103, ITGAL, CD11a, LFA-1, ITGAM, CD11b, ITGAX, CD11c, ITGB1, CD29, ITGB2, CD18, LFA-1, ITGB7, TNFR2, TRANCE/RANKL, DNAM1 (CD226), SLAMF4 (CD244, 2B4), CD84, CD96 (Tactile), CEACAM1, CRTAM, Ly9 (CD229), CD160 (BY55), PSGL1, CD100 (SEMA4D), CD69, SLAMF6 (NTB-A, Ly108), SLAM (SLAMF1, CD150, IPO-3), BLAME (SLAMF8), SELPLG (CD162), LTBR, LAT, GADS, SLP-76, PAG/Cbp, NKp44, NKp30, NKp46, and NKG2D, or a functional fragment thereof.

[0163] In some embodiments, the antigen binding domain binds a tumor antigen. In some embodiments, the tumor antigen is selected from the group consisting of: CD19; CD123; CD22; CD30; CD171; CS-1 (also referred to as CD2 subset 1, CRACC, SLAMF7, CD319, and 19A24); C-type lectin-like molecule-1 (CLL-1 or CLECL1); CD33; epidermal growth factor receptor variant III (EGFRvIII); ganglioside G2 (GD2); ganglioside GD3 (aNeu5Ac(2-8)aNeu5Ac(2-3)bDGalp(1-4)bDGlcp(1-1)Cer); TNF receptor family member B cell maturation (BCMA); Tn antigen ((Tn Ag) or (GalNAcα-Ser/Thr)); prostate-specific membrane antigen (PSMA); Receptor tyrosine kinase-like orphan receptor 1 (ROR1); Fms-Like Tyrosine Kinase 3 (FLT3); Tumor-associated glycoprotein 72 (TAG72); CD38; CD44v6; Carcinoembryonic antigen (CEA); Epithelial cell adhesion molecule (EPCAM); B7H3 (CD276); KIT (CD117); Interleukin-13 receptor subunit alpha-2 (IL-13Ra2 or CD213A2); Mesothelin; Interleukin 11 receptor alpha (IL-11Ra); prostate stem cell antigen (PSCA); Protease Serine 21 (Testisin or PRSS21); vascular endothelial growth factor receptor 2 (VEGFR2); Lewis(Y) antigen; CD24; Platelet-derived growth factor receptor beta (PDGFR-beta); Stage-specific embryonic antigen-4 (S SEA-4); CD20; Folate receptor alpha; Receptor tyrosine-protein kinase ERBB2 (Her2/neu); Mucin 1, cell surface associated (MUC1); epidermal growth factor receptor (EGFR); neural cell adhesion molecule (NCAM); Prostase; prostatic acid phosphatase (PAP); elongation factor 2 mutated (ELF2M); Ephrin B2; fibroblast activation protein alpha (FAP); insulin-like growth factor 1 receptor (IGF-I receptor), carbonic anhydrase IX (CAIX); Proteasome (Prosome, Macropain) Subunit, Beta Type, 9 (LMP2); glycoprotein 100 (gp100); oncogene fusion protein consisting of breakpoint cluster region (BCR) and Abelson murine leukemia viral oncogene homolog 1 (Abl) (bcr-abl); tyrosinase; ephrin type-A receptor 2 (EphA2); Fucosyl GM1; sialyl Lewis adhesion molecule (sLe); ganglioside GM3 (aNeu5Ac(2-3)bDGalp(1-4)bDGlcp(1-1)Cer); transglutaminase 5 (TGS5); high molecular weight-melanoma-associated antigen (HMWMAA); o-acetyl-GD2 ganglioside (OAcGD2); Folate receptor beta; tumor endothelial marker 1 (TEM1/CD248); tumor endothelial marker 7-related (TEM7R); claudin 6 (CLDN6); thyroid stimulating hormone receptor (TSHR); G protein-coupled receptor class C group 5, member D (GPRC5D); chromosome X open reading frame 61 (CXORF61); CD97; CD179a; anaplastic lymphoma kinase (ALK); Polysialic acid; placenta-specific 1 (PLAC1); hexasaccharide portion of globoH glycoceramide (GloboH); mammary gland differentiation antigen (NY-BR-1); uroplakin 2 (UPK2); Hepatitis A virus cellular receptor 1 (HAVCR1); adrenoceptor beta 3 (ADRB3); pannexin 3 (PANX3); G protein-coupled receptor 20 (GPR20); lymphocyte antigen 6 complex, locus K 9 (LY6K); Olfactory receptor 51E2 (OR51E2); TCR Gamma Alternate Reading Frame Protein (TARP); Wilms tumor protein (WT1); Cancer/testis antigen 1 (NY-ESO-1); Cancer/testis antigen 2 (LAGE-1a); Melanoma-associated antigen 1 (MAGE-A1); ETS translocation-variant gene 6, located on chromosome 12p (ETV6-AML); sperm protein 17 (SPA17); X Antigen Family, Member 1A (XAGE1); angiopoietin-binding cell surface receptor 2 (Tie 2); melanoma cancer testis antigen-1 (MAD-CT-1); melanoma cancer testis antigen-2 (MAD-CT-2); Fos-related antigen 1; tumor protein p53 (p53); p53 mutant; prostein; survivin; telomerase; prostate carcinoma tumor antigen-1 (PCTA-1 or Galectin 8), melanoma antigen recognized by T cells 1 (MelanA or MART1); Rat sarcoma (Ras) mutant; human Telomerase reverse transcriptase (hTERT); sarcoma translocation breakpoints; melanoma inhibitor of apoptosis (ML-IAP); ERG (transmembrane protease, serine 2 (TMPRSS2) ETS fusion gene); N-Acetyl glucosaminyl-transferase V (NA17); paired box protein Pax-3 (PAX3); Androgen receptor; Cyclin B1; v-myc avian myelocytomatosis viral oncogene neuroblastoma derived homolog (MYCN); Ras Homolog Family Member C (RhoC); Tyrosinase-related protein 2 (TRP-2); Cytochrome P450 1B1 (CYP1B1); CCCTC-Binding Factor (Zinc Finger Protein)-Like (BORIS or Brother of the Regulator of Imprinted Sites), Squamous Cell Carcinoma Antigen Recognized By T Cells 3 (SART3); Paired box protein Pax-5 (PAX5); proacrosin binding protein sp32 (OY-TES1); lymphocyte-specific protein tyrosine kinase (LCK); A kinase anchor protein 4 (AKAP-4); synovial sarcoma, X breakpoint 2 (SSX2); Receptor for Advanced Glycation Endproducts (RAGE-1); renal ubiquitous 1 (RU1); renal ubiquitous 2 (RU2); legumain; human papilloma virus E6 (HPV E6); human papilloma virus E7 (HPV E7); intestinal carboxyl esterase; heat shock protein 70-2 mutated (mut hsp70-2); CD79a; CD79b; CD72; Leukocyte-associated immunoglobulin-like receptor 1 (LAIR1); Fc fragment of IgA receptor (FCAR or CD89); Leukocyte immunoglobulin-like receptor subfamily A member 2 (LILRA2); CD300 molecule-like family member f (CD300LF); C-type lectin domain family 12 member A (CLEC12A); bone marrow stromal cell antigen 2 (BST2); EGF-like module-containing mucin-like hormone receptor-like 2 (EMR2); lymphocyte antigen 75 (LY75); Glypican-3 (GPC3); Fc receptor-like 5 (FCRL5); and immunoglobulin lambda-like polypeptide 1 (IGLL1). In some embodiments, the tumor antigen is selected from CD150, 5T4, ActRIIA, B7, BMCA, CA-125, CCNA1, CD123, CD126, CD138, CD14, CD148, CD15, CD19, CD20, CD200, CD21, CD22, CD23, CD24, CD25, CD26, CD261, CD262, CD30, CD33, CD362, CD37, CD38, CD4, CD40, CD40L, CD44, CD46, CD5, CD52, CD53, CD54, CD56, CD66a-d, CD74, CD8, CD80, CD92, CE7, CS-1, CSPG4, ED-B fibronectin, EGFR, EGFRvIII, EGP-2, EGP-4, EPHa2, ErbB2, ErbB3, ErbB4, FBP, GD2, GD3, HER1-HER2 in combination, HER2-HER3 in combination, HERV-K, HIV-1 envelope glycoprotein gp120, HIV-1 envelope glycoprotein gp41, HLA-DR, HM1.24, HMW-MAA, Her2, Her2/neu, IGF-1R, IL-11Ralpha, IL-13R-alpha2, IL-2, IL-22R-alpha, IL-6, IL-6R, Ia, Ii, L1-CAM, L1-cell adhesion molecule, Lewis Y, L1-CAM, MAGE A3, MAGE-A1, MART-1, MUC1, NKG2C ligands, NKG2D Ligands, NY-ESO-1, OEPHa2, PIGF, PSCA, PSMA, ROR1, T101, TAC, TAG72, TIM-3, TRAIL-R1, TRAIL-R1 (DR4), TRAIL-R2 (DR5), VEGF, VEGFR2, WT-1, a G-protein coupled receptor, alphafetoprotein (AFP), an angiogenesis factor, an exogenous cognate binding molecule (ExoCBM), oncogene product, anti-folate receptor, c-Met, carcinoembryonic antigen (CEA), cyclin (D1), ephrinB2, epithelial tumor antigen, estrogen receptor, fetal acethycholine e receptor, folate binding protein, gp100, hepatitis B surface antigen, kappa chain, kappa light chain, kdr, lambda chain, livin, melanoma-associated antigen, mesothelin, mouse double minute 2 homolog (MDM2), mucin 16 (MUC16), mutated p53, mutated ras, necrosis antigens, oncofetal antigen, ROR2, progesterone receptor, prostate specific antigen, tEGFR, tenascin, β2-Microglobulin, Fc Receptor-like 5 (FcRL5), or molecules expressed by HIV, HCV, HBV, or other pathogens. In some embodiments, the tumor antigen is a solid tumor antigen, e.g., mesothelin. In some embodiments, the tumor antigen is expressed in a solid tumor that also expresses an immune checkpoint inhibitor, e.g., PD-L1.

[0164] In some embodiments, the antigen binding domain comprises an antibody, an antibody fragment, an scFv, a Fv, a Fab, a (Fab′)2, a single domain antibody (SDAB), a VH or VL domain, or a camelid VHH domain.

[0165] In some embodiments, wherein the transmembrane domain comprises a transmembrane domain of a protein selected from the group consisting of the alpha, beta or zeta chain of the T-cell receptor, CD28, CD3 epsilon, CD45, CD4, CD5, CD8, CD9, CD16, CD22, CD33, CD37, CD64, CD80, CD86, CD134, CD137, CD154, KIRDS2, OX40, CD2, CD27, LFA-1 (CD11a, CD18), ICOS (CD278), 4-1BB (CD137), GITR, CD40, BAFFR, HVEM (LIGHTR), SLAMF7, NKp80 (KLRF1), CD160, CD19, IL2R beta, IL2R gamma, IL7Rα, ITGA1, VLA1, CD49a, ITGA4, IA4, CD49D, ITGA6, VLA-6, CD49f, ITGAD, CD11d, ITGAE, CD103, ITGAL, CD11a, LFA-1, ITGAM, CD11b, ITGAX, CD11c, ITGB1, CD29, ITGB2, CD18, LFA-1, ITGB7, TNFR2, DNAM1 (CD226), SLAMF4 (CD244, 2B4), CD84, CD96 (Tactile), CEACAM1, CRTAM, Ly9 (CD229), CD160 (BY55), PSGL1, CD100 (SEMA4D), SLAMF6 (NTB-A, Ly108), SLAM (SLAMF1, CD150, IPO-3), BLAME (SLAMF8), SELPLG (CD162), LTBR, PAG/Cbp, NKp44, NKp30, NKp46, NKG2D, and NKG2C, or a functional variant thereof.

[0166] In some embodiments, the antigen binding domain is connected to the transmembrane domain by a hinge region.

[0167] In some embodiments, the composition further encodes a leader sequence.

[0168] In some embodiments, the composition comprises:

[0169] (a) a nucleic acid molecule encoding a chimeric antigen receptor (CAR) polypeptide,

[0170] (b) an SHP1 inhibitor, wherein the SHP1 inhibitor is chosen from:
[0171] (i) one or more components of a gene editing system targeting one or more sites within a gene encoding SHP1 or a regulatory element thereof, a nucleic acid molecule encoding the one or more components of the gene editing system, or a combination thereof, or
[0172] (2) an agent that has RNAi or antisense inhibition activity against SHP1, or a nucleic acid molecule encoding the agent, and

[0173] (c) an SHP2 inhibitor, wherein the SHP2 inhibitor is chosen from:
[0174] (i) one or more components of a gene editing system targeting one or more sites within a gene encoding SHP2 or a regulatory element thereof, a nucleic acid molecule encoding the one or more components of the gene editing system, or a combination thereof, or
[0175] (2) an agent that has RNAi or antisense inhibition activity against SHP2, or a nucleic acid molecule encoding the agent.

[0176] In some embodiments, the composition is DNA or RNA.

[0177] In some embodiments, the SHP inhibitor comprises:

[0178] (i) a nucleic acid molecule encoding the one or more components of the gene editing system targeting one or more sites within a gene encoding SHP (e.g., SHP1 or SHP2) or a regulatory element thereof, or

[0179] (ii) a nucleic acid molecule encoding the agent having RNAi or antisense inhibition activity against SHP (e.g., SHP1 or SHP2). In some embodiments, the nucleic acid molecule encoding the CAR polypeptide, the nucleic acid molecule encoding the one or more components of the gene editing system, and the nucleic acid molecule encoding the agent having RNAi or antisense inhibition activity are disposed on a single nucleic acid molecule. In some embodiments, the nucleic acid molecule encoding the CAR polypeptide, the nucleic acid molecule encoding the one or more components of the gene editing system, and the nucleic acid molecule encoding the agent having RNAi or antisense inhibition activity are disposed on separate nucleic acid molecules.

[0180] In one aspect, disclosed herein is a vector comprising any of the aforementioned compositions.

[0181] In one aspect, disclosed herein is a cell (e.g., a population of immune effector cells) comprising any of the aforementioned compositions or vectors. In some embodiments, the cell is chosen from a human T cell (e.g., CD8+ T cell or CD4+ T cell) or a human NK cell.

[0182] In one aspect, disclosed herein is a method of making a CAR-expressing cell (e.g., a population of CAR-expressing immune effector cells), comprising culturing any of the aforementioned cells under conditions such that the CAR polypeptide is expressed.

[0183] In one aspect, disclosed herein is a method of providing anti-tumor immunity in a subject, comprising administering to the subject an effective amount of any of the aforementioned cells. In some embodiments, the cell is an autologous T cell or an allogeneic T cell, or an autologous NK cell or an allogeneic NK cell.

[0184] In one aspect, disclosed herein is a method of treating cancer in a subject in need thereof, comprising administering to the subject an effective amount of any of the aforementioned cells, thereby treating the subject. In some embodiments, the cancer is selected from the group consisting of colon cancer, rectal cancer, renal-cell carcinoma, liver cancer, non-small cell carcinoma of the lung, cancer of the small intestine, cancer of the esophagus, melanoma, bone cancer, pancreatic cancer, skin cancer, cancer of the head or neck, cutaneous or intraocular malignant melanoma, uterine cancer, ovarian cancer, rectal cancer, cancer of the anal region, stomach cancer, testicular cancer, uterine cancer, carcinoma of the fallopian tubes, carcinoma of the endometrium, carcinoma of the cervix, carcinoma of the vagina, carcinoma of the vulva, Hodgkin's Disease, non-Hodgkin lymphoma, cancer of the endocrine system, cancer of the thyroid gland, cancer of the parathyroid gland, cancer of the adrenal gland, sarcoma of soft tissue, cancer of the urethra, cancer of the penis, solid tumors of childhood, cancer of the bladder, cancer of the kidney or ureter, carcinoma of the renal pelvis, neoplasm of the central nervous system (CNS), primary CNS lymphoma, tumor angiogenesis, spinal axis tumor, brain stem glioma, pituitary adenoma, Kaposi's sarcoma, epidermoid cancer, squamous cell cancer, T-cell lymphoma, environmentally induced cancers, combinations of said cancers, and metastatic lesions of said cancers. In some embodiments, the cancer is a hematologic cancer chosen from one or more of chronic lymphocytic leukemia (CLL), acute leukemias, acute lymphoid leukemia (ALL), B-cell acute lymphoid leukemia (B-ALL), T-cell acute lymphoid leukemia (T-ALL), chronic myelogenous leukemia (CML), B cell prolymphocytic leukemia, blastic plasmacytoid dendritic cell neoplasm, Burkitt's lymphoma, diffuse large B cell lymphoma, follicular lymphoma, hairy cell leukemia, small cell- or a large cell-follicular lymphoma, malignant lymphoproliferative conditions, MALT lymphoma, mantle cell lymphoma, marginal zone lymphoma, multiple myeloma, myelodysplasia and myelodysplastic syndrome, non-Hodgkin's lymphoma, Hodgkin's lymphoma, plasmablastic lymphoma, plasmacytoid dendritic cell neoplasm, Waldenstrom macroglobulinemia, or pre-leukemia.

[0185] Unless otherwise defined, all technical and scientific terms used herein have the same meaning as commonly understood by one of ordinary skill in the art to which this invention belongs. Although methods and materials similar or equivalent to those described herein can be used in the practice or testing of the present invention, suitable methods and materials are described below. All publications, patent applications, patents, and other references mentioned herein are incorporated by reference in their entirety. In addition, the materials, methods, and examples are illustrative only and not intended to be limiting.

[0186] Other features and advantages of the invention will be apparent from the detailed description, drawings, and from the claims.

### BRIEF DESCRIPTION OF THE DRAWINGS

[0187] FIG. 1 shows a diagram of examples of inhibitory receptors (IRs) involved in immunosuppression of CAR T cells.

[0188] FIG. 2 shows a diagram of TCR signaling, highlighting the role of SHP1.

[0189] FIG. 3 shows graphs of tumor cell killing (top) and IFNg secretion (bottom) of anti-mesothelin CAR TIL cells recovered after CAR T cells were injected into NSG flank tumors; recovered TIL cells were treated or not treated with SSG. “cryo mesoCAR” represents T cells that were not injected but cryopreserved, “mesoCAR TIL” represents T cells that were injected, then isolated from flank tumors at the experiment endpoint.

[0190] FIG. 4 shows a graph of phosphatase activity of SHP1 WT, C453S, and R459M.

[0191] FIG. 5 shows a graph of tumor cell killing by CAR T cells transfected with mRNA encoding anti-mesothelin CAR and no SHP1, WT SHP1, C453S SHP1, or R459M SHP1.

[0192] FIG. 6 shows a graph of T cell proliferation after viral transduction of SHP1-targeting shRNA and anti-CD3/28 bead activation.

[0193] FIG. 7 shows a diagram of SHP1 activation and depicts the roles of the N-SH2 domain and ITIMs.

[0194] FIG. 8 shows the amino acid sequences of SH2-N (SEQ ID NO: 40) and SH2-N-R30K (SEQ ID NO: 41).

[0195] FIG. 9 shows a diagram of lentiviral vectors comprising SS1BBz CAR and either SH2-N SHP1 or SH2-N-R30K SHP1.

[0196] FIG. 10 shows a flow cytometry data showing cytokine secretion upon stimulation with plate-bound CD3 of CD8+ T cells transduced with CAR, CAR and SH2-N SHP1, or CAR and SH2-N-R30K SHP1. The Y-axes in 1st column is IL2 expression, in 2nd column TNFα, and 3rd column IFNg; X-axes for all dot-plots are PD1 expression.

[0197] FIG. 11 shows graphs of EMMESO (top) or EMMESO-PDL1 (bottom) cell killing by T cells transduced with CAR, CAR and SH2-N SHP1, or CAR and SH2-N-R30K SHP1.

[0198] FIG. 12 shows caliper measurements of flank tumor size after mice were injected with NTD T cells, NTD T cells and SSG, CAR T cells, CAR T cells and SSG, CAR SH2-N T cells, or CAR SH2-N-R30K T cells.

[0199] FIG. 13 shows a graph of TIL infiltration of tumors after injection with CAR T cells, CAR T cells and SSG, CAR SH2-N T cells, or CAR SH2-N-R30K T cells, measured using flow cytometry (% represents CD3+ events within viable, singlet gate).

[0200] FIG. 14 shows graphs of the frequency of PD1 expression (top) or TIM3/CEACAM1 expression (bottom) in TILs recovered from tumors injected with CAR T cells, CAR T cells and SSG, CAR SH2-N T cells, or CAR SH2-N-R30K T cells, measured using flow cytometry.

[0201] FIG. 15 shows graphs of EMMESO (top) or EMMESO-PDL1 (bottom) cell killing by CAR T cells, or TILs recovered from tumors injected with CAR T cells, CAR T cells and SSG, CAR SH2-N T cells, or CAR SH2-N-R30K T cells at various E:T ratios.

[0202] FIGS. 16A and 16B show graphs of the percentage of pZap70 positive T cells when CARGFP cells, dnSHP1 CAR cells, dnSHP2 CAR cells, or dnSHP1&2 CAR cells were co-cultured with EMMESO tumor cells (FIG. 16A) or EMMESO-PD-L1 tumor cells (FIG. 16B). Gating was on live, singlet, CAR positive T cells.

[0203] FIG. 17 shows flow cytometry plots of CARGFP cells, dnSHP1 CAR cells, dnSHP2 CAR cells, or dnSHP1&2 CAR cells that were stained for CD8 and IFNγ or IL2.

### DETAILED DESCRIPTION

[0204] Compositions and uses that improve an activity (e.g., one or more of function, persistence, cancer killing effect, or tumor infiltration) of an immune effector cell, e.g., a population of immune effector cells (e.g., T cells, NK cells) are disclosed. In some embodiments, the immune effector cell expresses a Chimeric Antigen Receptor molecule (e.g., a CAR polypeptide) that binds to a tumor antigen. In some embodiments, the immune effector cell comprises, or is contacted with an inhibitor of a Src homology region 2 domain-containing phosphatase (SHP). In one embodiment, the inhibitor is an inhibitor of SHP-1. In another embodiment, the inhibitor is an inhibitor of SHP-2. In one embodiment, the SHP inhibitor interferes with SHP signaling (e.g., interferes with SHP-1 signaling or SHP-2 signaling, or both), also referred to herein as an SHP inhibitor molecule (e.g., an SHP inhibitor polypeptide). In general, the invention features, at least in part, immune cells, e.g., T-cells, containing a CAR molecule and an SHP inhibitor molecule, e.g., an SHP inhibitor polypeptide. The invention is based, at least in part, on the discovery that immune effector cells comprising one or more SHP inhibitor polypeptides result in one or more of: increased killing of tumor cells, increased cytokine release, and increased tumor infiltration in vitro and in vivo.

[0205] Without wishing to be bound by theory, SHP1 (and SHP2) regulates T cell receptor signaling, and is activated by inhibitory receptors (IRs). IR signaling down-regulates T cell function, lowering the efficacy of CAR T cell therapies in targeting and killing tumor cells. SHP inhibition is expected to interfere with the signaling of immunosuppressive factors, such as IRs, or checkpoint molecules. In certain embodiments, the IRs are present in the microenvironment of a tumor, e.g., a solid tumor, thus resulting in decreased effectiveness of a therapy, e.g., a CAR therapy, in the tumor microenvironment. SHP inhibitor molecules, e.g., polypeptides that inhibit SHP1 and/or SHP2, and, when co-expressed with a CAR in an immune effector cell, result in one or more of: increase killing of tumor cells, increase cytokine release, and increase tumor infiltration in vitro and in vivo. The SHP inhibitor molecules disclosed herein are compatible with a wide array of CARs, also described herein.

### Definitions

[0206] Unless defined otherwise, all technical and scientific terms used herein have the same meaning as commonly understood by one of ordinary skill in the art to which the invention pertains.

[0207] The term “a” and “an” refers to one or to more than one (i.e., to at least one) of the grammatical object of the article. By way of example, “an element” means one element or more than one element.

[0208] The term “about” when referring to a measurable value such as an amount, a temporal duration, and the like, is meant to encompass variations of ±20% or in some instances ±10%, or in some instances ±5%, or in some instances ±1%, or in some instances ±0.1% from the specified value, as such variations are appropriate to perform the disclosed methods.

[0209] The term “Chimeric Antigen Receptor” or alternatively a “CAR” refers to a set of polypeptides, typically two in the simplest embodiments, which when in an immune effector cell, provides the cell with specificity for a target cell, typically a cancer cell, and with intracellular signal generation. The terms “CAR” and “CAR molecule” are used interchangeably. In some embodiments, a CAR comprises at least an extracellular antigen binding domain, a transmembrane domain and a cytoplasmic signaling domain (also referred to herein as “an intracellular signaling domain”) comprising a functional signaling domain derived from a stimulatory molecule and/or costimulatory molecule as defined below. In some embodiments, the set of polypeptides are in the same polypeptide chain (e.g., comprise a chimeric fusion protein). In some aspects, the set of polypeptides are contiguous with each other. In some embodiments, the set of polypeptides are not contiguous with each other, e.g., are in different polypeptide chains. In some embodiments, the set of polypeptides include a dimerization switch that, upon the presence of a dimerization molecule, can couple the polypeptides to one another, e.g., can couple an antigen binding domain to an intracellular signaling domain. In one aspect, the stimulatory molecule is the zeta chain associated with the T cell receptor complex. In one aspect, the cytoplasmic signaling domain further comprises one or more functional signaling domains derived from at least one costimulatory molecule as defined below. In one aspect, the costimulatory molecule is chosen from the costimulatory molecules described herein, e.g., 4-1BB (i.e., CD137), CD27 and/or CD28. In one aspect, the CAR comprises a chimeric fusion protein comprising an extracellular antigen binding domain, a transmembrane domain and an intracellular signaling domain comprising a functional signaling domain derived from a stimulatory molecule. In one aspect, the CAR comprises a chimeric fusion protein comprising an extracellular antigen binding domain, a transmembrane domain and an intracellular signaling domain comprising a functional signaling domain derived from a costimulatory molecule and a functional signaling domain derived from a stimulatory molecule. In one aspect, the CAR comprises a chimeric fusion protein comprising an extracellular antigen binding domain, a transmembrane domain and an intracellular signaling domain comprising two functional signaling domains derived from one or more costimulatory molecule(s) and a functional signaling domain derived from a stimulatory molecule. In one aspect, the CAR comprises a chimeric fusion protein comprising an extracellular antigen binding domain, a transmembrane domain and an intracellular signaling domain comprising at least two functional signaling domains derived from one or more costimulatory molecule(s) and a functional signaling domain derived from a stimulatory molecule. In one aspect the CAR comprises an optional leader sequence at the amino-terminus (N-ter) of the CAR fusion protein. In one aspect, the CAR further comprises a leader sequence at the N-terminus of the extracellular antigen binding domain, wherein the leader sequence is optionally cleaved from the antigen binding domain (e.g., a scFv) during cellular processing and localization of the CAR to the cellular membrane.

[0210] A CAR that comprises an antigen binding domain (e.g., a scFv, or TCR) that targets a specific tumor maker X, such as those described herein, is also referred to as XCAR. For example, a CAR that comprises an antigen binding domain that targets CD19 is referred to as CD19CAR.

[0211] The term “signaling domain” refers to the functional portion of a protein which acts by transmitting information within the cell to regulate cellular activity via defined signaling pathways by generating second messengers or functioning as effectors by responding to such messengers.

[0212] The term “antibody,” as used herein, refers to a protein, or polypeptide sequence derived from an immunoglobulin molecule which specifically binds with an antigen. Antibodies can be polyclonal or monoclonal, multiple or single chain, or intact immunoglobulins, and may be derived from natural sources or from recombinant sources. Antibodies can be tetramers of immunoglobulin molecules.

[0213] The term “antibody fragment” refers to at least one portion of an antibody, that retains the ability to specifically interact with (e.g., by binding, steric hindrance, stabilizing/destabilizing, spatial distribution) an epitope of an antigen. Examples of antibody fragments include, but are not limited to, Fab, Fab′, F(ab′)₂, Fv fragments, scFv antibody fragments, disulfide-linked Fvs (sdFv), a Fd fragment consisting of the VH and CH1 domains, linear antibodies, single domain antibodies such as sdAb (either VL or VH), camelid VHH domains, multi-specific antibodies formed from antibody fragments such as a bivalent fragment comprising two Fab fragments linked by a disulfide bridge at the hinge region, and an isolated CDR or other epitope binding fragments of an antibody. An antigen binding fragment can also be incorporated into single domain antibodies, maxibodies, minibodies, nanobodies, intrabodies, diabodies, triabodies, tetrabodies, v-NAR and bis-scFv (see, e.g., Hollinger and Hudson, Nature Biotechnology 23:1126-1136, 2005). Antigen binding fragments can also be grafted into scaffolds based on polypeptides such as a fibronectin type III (Fn3) (see U.S. Pat. No. 6,703,199, which describes fibronectin polypeptide minibodies).

[0214] The term “scFv” refers to a fusion protein comprising at least one antibody fragment comprising a variable region of a light chain and at least one antibody fragment comprising a variable region of a heavy chain, wherein the light and heavy chain variable regions are contiguously linked, e.g., via a synthetic linker, e.g., a short flexible polypeptide linker, and capable of being expressed as a single chain polypeptide, and wherein the scFv retains the specificity of the intact antibody from which it is derived. Unless specified, as used herein an scFv may have the VL and VH variable regions in either order, e.g., with respect to the N-terminal and C-terminal ends of the polypeptide, the scFv may comprise VL-linker-VH or may comprise VH-linker-VL.

[0215] The portion of the CAR comprising an antibody or antibody fragment thereof may exist in a variety of forms where the antigen binding domain is expressed as part of a contiguous polypeptide chain including, for example, a single domain antibody fragment (sdAb), a single chain antibody (scFv), a humanized antibody or bispecific antibody (Harlow et al., 1999, In: Using Antibodies: A Laboratory Manual, Cold Spring Harbor Laboratory Press, NY; Harlow et al., 1989, In: Antibodies: A Laboratory Manual, Cold Spring Harbor, N.Y.; Houston et al., 1988, Proc. Natl. Acad. Sci. USA 85:5879-5883; Bird et al., 1988, Science 242:423-426). In one aspect, the antigen binding domain of a CAR composition of the invention comprises an antibody fragment. In a further aspect, the CAR comprises an antibody fragment that comprises a scFv. The precise amino acid sequence boundaries of a given CDR can be determined using any of a number of well-known schemes, including those described by Kabat et al. (1991), “Sequences of Proteins of Immunological Interest,” 5th Ed. Public Health Service, National Institutes of Health, Bethesda, Md. (“Kabat” numbering scheme), Al-Lazikani et al., (1997) JMB 273,927-948 (“Chothia” numbering scheme), or a combination thereof.

[0216] As used herein, the term “binding domain” or “antibody molecule” refers to a protein, e.g., an immunoglobulin chain or fragment thereof, comprising at least one immunoglobulin variable domain sequence. The term “binding domain” or “antibody molecule” encompasses antibodies and antibody fragments. In an embodiment, an antibody molecule is a multispecific antibody molecule, e.g., it comprises a plurality of immunoglobulin variable domain sequences, wherein a first immunoglobulin variable domain sequence of the plurality has binding specificity for a first epitope and a second immunoglobulin variable domain sequence of the plurality has binding specificity for a second epitope. In an embodiment, a multispecific antibody molecule is a bispecific antibody molecule. A bispecific antibody has specificity for no more than two antigens. A bispecific antibody molecule is characterized by a first immunoglobulin variable domain sequence which has binding specificity for a first epitope and a second immunoglobulin variable domain sequence that has binding specificity for a second epitope.

[0217] The portion of the CAR comprising an antibody or antibody fragment thereof may exist in a variety of forms where the antigen binding domain is expressed as part of a contiguous polypeptide chain including, for example, a single domain antibody fragment (sdAb), a single chain antibody (scFv), a humanized antibody, or bispecific antibody (Harlow et al., 1999, In: Using Antibodies: A Laboratory Manual, Cold Spring Harbor Laboratory Press, NY; Harlow et al., 1989, In: Antibodies: A Laboratory Manual, Cold Spring Harbor, N.Y.; Houston et al., 1988, Proc. Natl. Acad. Sci. USA 85:5879-5883; Bird et al., 1988, Science 242:423-426). In one aspect, the antigen binding domain of a CAR composition of the invention comprises an antibody fragment. In a further aspect, the CAR comprises an antibody fragment that comprises a scFv.

[0218] The term “antibody heavy chain,” refers to the larger of the two types of polypeptide chains present in antibody molecules in their naturally occurring conformations, and which normally determines the class to which the antibody belongs.

[0219] The term “antibody light chain,” refers to the smaller of the two types of polypeptide chains present in antibody molecules in their naturally occurring conformations. Kappa (κ) and lambda (λ) light chains refer to the two major antibody light chain isotypes.

[0220] The term “recombinant antibody” refers to an antibody which is generated using recombinant DNA technology, such as, for example, an antibody expressed by a bacteriophage or yeast expression system. The term should also be construed to mean an antibody which has been generated by the synthesis of a DNA molecule encoding the antibody and which DNA molecule expresses an antibody protein, or an amino acid sequence specifying the antibody, wherein the DNA or amino acid sequence has been obtained using recombinant DNA or amino acid sequence technology which is available and well known in the art.

[0221] The term “antigen” or “Ag” refers to a molecule that provokes an immune response. This immune response may involve either antibody production, or the activation of specific immunologically-competent cells, or both. The skilled artisan will understand that any macromolecule, including virtually all proteins or peptides, can serve as an antigen. Furthermore, antigens can be derived from recombinant or genomic DNA. A skilled artisan will understand that any DNA, which comprises a nucleotide sequences or a partial nucleotide sequence encoding a protein that elicits an immune response therefore encodes an “antigen” as that term is used herein. Furthermore, one skilled in the art will understand that an antigen need not be encoded solely by a full length nucleotide sequence of a gene. It is readily apparent that the present invention includes, but is not limited to, the use of partial nucleotide sequences of more than one gene and that these nucleotide sequences are arranged in various combinations to encode polypeptides that elicit the desired immune response. Moreover, a skilled artisan will understand that an antigen need not be encoded by a “gene” at all. It is readily apparent that an antigen can be generated synthesized or can be derived from a biological sample, or might be macromolecule besides a polypeptide. Such a biological sample can include, but is not limited to a tissue sample, a tumor sample, a cell or a fluid with other biological components.

[0222] As used herein, the term “SHP inhibitor” refers to any molecule capable of inhibiting or reducing expression and/or function of SHP. In one embodiment, the SHP inhibitor is a SHP inhibitor molecule. The term “SHP inhibitor molecule” refers to a nucleic acid or a polypeptide that interferes with SHP signaling (e.g., interferes with SHP-1 signaling or SHP-2 signaling, or both), e.g., in a cell, e.g., an immune effector cells. In some embodiments, the SHP inhibitor molecule is a dominant negative molecule that interferes with SHP signaling in a cell, e.g., an immune effector cell, e.g., an immune effector cell that expresses a CAR molecule (e.g., a CAR polypeptide) that binds to a tumor antigen. The SHP inhibitor can reduce the effects of one or more IRs by inhibiting a signaling component of multiple IR pathways. The SHP inhibitor molecules described herein, when expressed in an immune effector cell, e.g., a CAR-expressing immune effector cell, can result in one or more of: (i) reduced immune checkpoint inhibition, e.g., IR inhibitor, (ii) reduced IR signaling, e.g., PD-1/PD-L1 signaling, (iii) increased levels of CD3z phosphorylation, (iv) increased levels of LAT phosphorylation, (v) increased phosphorylation of Lck, (vi) increased phosphorylation of ZAP70, (vii) increased expression of a cytokine, e.g., IFNγ or IL2, (viii) increased CAR and/or TCR signaling, (ix) increased killing of a tumor cell, e.g., a solid tumor cell, via a CAR molecule, in vitro and in vivo, e.g., compared to an otherwise similar cell that lacks the SHP inhibitor molecule.

[0223] In embodiments where the SHP inhibitor molecule is a polypeptide, also, referred to herein as an “SHP inhibitor polypeptide.” In some embodiments, the SHP inhibitor polypeptide includes an amino acid sequence derived from SHP1 (also known as: Src homology region 2 domain-containing phosphatase-1, or tyrosine-protein phosphatase non-receptor type 6) or an amino acid sequence derived from SHP2 (also known as: protein-tyrosoine phosphatase 1D (PTP-1D), protein-tyrosine phosphatase 2C (PTP-2C), or tyrosine-protein phosphatase non-receptor type 11 (PTPN11)) that inhibits the function of SHP1, SHP2, or both SHP1 and SHP2. In some embodiments, an SHP inhibitor polypeptide comprises less than 240, 220, 180, 160, 140, 120, 100, 80, 60, or 40 amino acids in length. In some embodiments, the SHP inhibitor polypeptide comprises an amino acid sequence at least 75, 80, 85, 90, 95, 99, or 100% identical to a corresponding sequence of SHP-1 or SHP-2, described herein as SEQ ID NO: 1 or SEQ ID NO:2, respectively. In some embodiments, the SHP inhibitor polypeptide comprises a single domain of SHP1 or SHP2, e.g., an SH2-N domain. In some embodiments, the SHP inhibitor polypeptide comprises one or more mutations, e.g., substitutions, insertions, or deletions, relative to the amino acid sequence of SHP1 or SHP2. In some embodiments, the SHP inhibitor polypeptide includes a mutation in the N-terminal region of the SHP, e.g., the N-SH2 region of an SHP, e.g., an SHP-1 or SHP-2. In some embodiments, the mutation is in the binding region of the N-SH2 region for an ITIM, e.g., an ITIM-domain present in an IR, e.g., PD-1. In some embodiments, the N-SH2 mutation is at position 30 of SHP-1, e.g., an R30K substitution in SHP-1 as described herein. Alternatively or in combination with the N-SH2 region mutation, the SHP inhibitor has a mutation in, e.g., a deletion of, part or all of the catalytic domain, e.g., the phosphatase domain, of an SHP, e.g., an SHP-1 or SHP-2.

[0224] The terms “SHP1 polypeptide” and “SHP2 polypeptide” refer to SHP polypeptides derived from (e.g., having an amino acid sequence identical or substantially identical to) SHP1 and SHP2, respectively.

[0225] The terms “N-SH2” and “SH2-N” refer to the N-terminal SH2 domain of SHP1 or SHP2.

[0226] The terms “N-SH2-R30K”, “SH2-N-R30K”, “N-SH2-R30K SHP1” and variants thereof refer to a SHP inhibitor polypeptide comprising an amino acid sequence derived from N-terminal SH2 domain of SHP1, further comprising a mutation at position 30 from arginine to lysine.

[0227] The term “anti-cancer effect” refers to a biological effect which can be manifested by various means, including but not limited to, e.g., a decrease in tumor volume, a decrease in the number of cancer cells, a decrease in the number of metastases, an increase in life expectancy, decrease in cancer cell proliferation, decrease in cancer cell survival, or amelioration of various physiological symptoms associated with the cancerous condition. An “anti-cancer effect” can also be manifested by the ability of the peptides, polynucleotides, cells and antibodies in prevention of the occurrence of cancer in the first place. The term “anti-tumor effect” refers to a biological effect which can be manifested by various means, including but not limited to, e.g., a decrease in tumor volume, a decrease in the number of tumor cells, a decrease in tumor cell proliferation, or a decrease in tumor cell survival.

[0228] The term “autologous” refers to any material derived from the same individual to whom it is later to be re-introduced into the individual.

[0229] The term “allogeneic” refers to any material derived from a different animal of the same species as the individual to whom the material is introduced. Two or more individuals are said to be allogeneic to one another when the genes at one or more loci are not identical. In some aspects, allogeneic material from individuals of the same species may be sufficiently unlike genetically to interact antigenically

[0230] The term “xenogeneic” refers to a graft derived from an animal of a different species.

[0231] The term “cancer” refers to a disease characterized by the uncontrolled growth of aberrant cells. Cancer cells can spread locally or through the bloodstream and lymphatic system to other parts of the body. Examples of various cancers are described herein and include but are not limited to, breast cancer, prostate cancer, ovarian cancer, cervical cancer, skin cancer, pancreatic cancer, colorectal cancer, renal cancer, liver cancer, brain cancer, lymphoma, leukemia, lung cancer and the like. The terms “tumor” and “cancer” are used interchangeably herein, e.g., both terms encompass solid and liquid, e.g., diffuse or circulating, tumors. As used herein, the term “cancer” or “tumor” includes premalignant, as well as malignant cancers and tumors.

[0232] “Derived from” as that term is used herein, indicates a relationship between a first and a second molecule. It generally refers to structural similarity between the first molecule and a second molecule and does not connotate or include a process or source limitation on a first molecule that is derived from a second molecule. For example, in the case of an intracellular signaling domain that is derived from a CD3zeta molecule, the intracellular signaling domain retains sufficient CD3zeta structure such that is has the required function, namely, the ability to generate a signal under the appropriate conditions. It does not connotate or include a limitation to a particular process of producing the intracellular signaling domain, e.g., it does not mean that, to provide the intracellular signaling domain, one must start with a CD3zeta sequence and delete unwanted sequence, or impose mutations, to arrive at the intracellular signaling domain.

[0233] The phrase “disease associated with expression of a tumor antigen as described herein” includes, but is not limited to, a disease associated with expression of a tumor antigen as described herein or condition associated with cells which express a tumor antigen as described herein including, e.g., proliferative diseases such as a cancer or malignancy or a precancerous condition such as a myelodysplasia, a myelodysplastic syndrome or a preleukemia; or a noncancer related indication associated with cells which express a tumor antigen as described herein. In one aspect, a cancer associated with expression of a tumor antigen as described herein is a hematological cancer. In one aspect, a cancer associated with expression of a tumor antigen as described herein is a solid cancer. Further diseases associated with expression of a tumor antigen described herein include, but not limited to, e.g., atypical and/or non-classical cancers, malignancies, precancerous conditions or proliferative diseases associated with expression of a tumor antigen as described herein. Non-cancer related indications associated with expression of a tumor antigen as described herein include, but are not limited to, e.g., autoimmune disease, (e.g., lupus), inflammatory disorders (allergy and asthma) and transplantation. In some embodiments, the tumor antigen-expressing cells express, or at any time expressed, mRNA encoding the tumor antigen. In an embodiment, the tumor antigen-expressing cells produce the tumor antigen protein (e.g., wild-type or mutant), and the tumor antigen protein may be present at normal levels or reduced levels. In an embodiment, the tumor antigen-expressing cells produced detectable levels of a tumor antigen protein at one point, and subsequently produced substantially no detectable tumor antigen protein.

[0234] The term “conservative sequence modifications” refers to amino acid modifications that do not significantly affect or alter the binding characteristics of the antibody or antibody fragment containing the amino acid sequence. Such conservative modifications include amino acid substitutions, additions and deletions. Modifications can be introduced into an antibody or antibody fragment of the invention by standard techniques known in the art, such as site-directed mutagenesis and PCR-mediated mutagenesis. Conservative amino acid substitutions are ones in which the amino acid residue is replaced with an amino acid residue having a similar side chain. Families of amino acid residues having similar side chains have been defined in the art. These families include amino acids with basic side chains (e.g., lysine, arginine, histidine), acidic side chains (e.g., aspartic acid, glutamic acid), uncharged polar side chains (e.g., glycine, asparagine, glutamine, serine, threonine, tyrosine, cysteine, tryptophan), nonpolar side chains (e.g., alanine, valine, leucine, isoleucine, proline, phenylalanine, methionine), beta-branched side chains (e.g., threonine, valine, isoleucine) and aromatic side chains (e.g., tyrosine, phenylalanine, tryptophan, histidine). Thus, one or more amino acid residues within a CAR of the invention can be replaced with other amino acid residues from the same side chain family and the altered CAR can be tested using the functional assays described herein.

[0235] The term “stimulation,” refers to a primary response induced by binding of a stimulatory molecule (e.g., a TCR/CD3 complex or CAR) with its cognate ligand (or tumor antigen in the case of a CAR) thereby mediating a signal transduction event, such as, but not limited to, signal transduction via the TCR/CD3 complex or signal transduction via the appropriate NK receptor or signaling domains of the CAR. Stimulation can mediate altered expression of certain molecules.

[0236] The term “stimulatory molecule,” refers to a molecule expressed by an immune cell (e.g., T cell, NK cell, B cell) that provides the cytoplasmic signaling sequence(s) that regulate activation of the immune cell in a stimulatory way for at least some aspect of the immune cell signaling pathway. In one aspect, the signal is a primary signal that is initiated by, for instance, binding of a TCR/CD3 complex with an MHC molecule loaded with peptide, and which leads to mediation of a T cell response, including, but not limited to, proliferation, activation, differentiation, and the like. A primary cytoplasmic signaling sequence (also referred to as a “primary signaling domain”) that acts in a stimulatory manner may contain a signaling motif which is known as immunoreceptor tyrosine-based activation motif or ITAM. Examples of an ITAM containing cytoplasmic signaling sequence that is of particular use in the invention includes, but is not limited to, those derived from CD3 zeta, common FcR gamma (FCER1G), Fc gamma RIIa, FcR beta (Fc Epsilon R1b), CD3 gamma, CD3 delta, CD3 epsilon, CD79a, CD79b, DAP10, and DAP12. In a specific CAR of the invention, the intracellular signaling domain in any one or more CARS of the invention comprises an intracellular signaling sequence, e.g., a primary signaling sequence of CD3-zeta. In a specific CAR of the invention, the primary signaling sequence of CD3-zeta is the sequence provided as SEQ ID NO:18, or the equivalent residues from a non-human species, e.g., mouse, rodent, monkey, ape and the like. In a specific CAR of the invention, the primary signaling sequence of CD3-zeta is the sequence as provided in SEQ ID NO:20, or the equivalent residues from a non-human species, e.g., mouse, rodent, monkey, ape and the like.

[0237] The term “antigen presenting cell” or “APC” refers to an immune system cell such as an accessory cell (e.g., a B-cell, a dendritic cell, and the like) that displays a foreign antigen complexed with major histocompatibility complexes (MHC's) on its surface. T-cells may recognize these complexes using their T-cell receptors (TCRs). APCs process antigens and present them to T-cells.

[0238] An “intracellular signaling domain,” as the term is used herein, refers to an intracellular portion of a molecule. The intracellular signaling domain generates a signal that promotes an immune effector function of the CAR containing cell, e.g., a CART cell. Examples of immune effector function, e.g., in a CART cell, include cytolytic activity and helper activity, including the secretion of cytokines.

[0239] In an embodiment, the intracellular signaling domain can comprise a primary intracellular signaling domain. Exemplary primary intracellular signaling domains include those derived from the molecules responsible for primary stimulation, or antigen dependent simulation. In an embodiment, the intracellular signaling domain can comprise a costimulatory intracellular domain. Exemplary costimulatory intracellular signaling domains include those derived from molecules responsible for costimulatory signals, or antigen independent stimulation. For example, in the case of a CART, a primary intracellular signaling domain can comprise a cytoplasmic sequence of a T cell receptor, and a costimulatory intracellular signaling domain can comprise cytoplasmic sequence from co-receptor or costimulatory molecule.

[0240] A primary intracellular signaling domain can comprise a signaling motif which is known as an immunoreceptor tyrosine-based activation motif or ITAM. Examples of ITAM containing primary cytoplasmic signaling sequences include, but are not limited to, those derived from CD3 zeta, common FcR gamma (FCER1G), Fc gamma RIIa, FcR beta (Fc Epsilon R1b), CD3 gamma, CD3 delta, CD3 epsilon, CD79a, CD79b, DAP10, and DAP12.

[0241] The term “zeta” or alternatively “zeta chain”, “CD3-zeta” or “TCR-zeta” is defined as the protein provided as GenBank Acc. No. BAG36664.1, or the equivalent residues from a non-human species, e.g., mouse, rodent, monkey, ape and the like, and a “zeta stimulatory domain” or alternatively a “CD3-zeta stimulatory domain” or a “TCR-zeta stimulatory domain” is defined as the amino acid residues from the cytoplasmic domain of the zeta chain, or functional derivatives thereof, that are sufficient to functionally transmit an initial signal necessary for T cell activation. In one aspect the cytoplasmic domain of zeta comprises residues 52 through 164 of GenBank Acc. No. BAG36664.1 or the equivalent residues from a non-human species, e.g., mouse, rodent, monkey, ape and the like, that are functional orthologs thereof. In one aspect, the “zeta stimulatory domain” or a “CD3-zeta stimulatory domain” is the sequence provided as SEQ ID NO:18. In one aspect, the “zeta stimulatory domain” or a “CD3-zeta stimulatory domain” is the sequence provided as SEQ ID NO:20.

[0242] The term a “costimulatory molecule” refers to a cognate binding partner on a T cell that specifically binds with a costimulatory ligand, thereby mediating a costimulatory response by the T cell, such as, but not limited to, proliferation. Costimulatory molecules are cell surface molecules other than antigen receptors or their ligands that are contribute to an efficient immune response. Costimulatory molecules include, but are not limited to an MHC class I molecule, BTLA and a Toll ligand receptor, as well as OX40, CD27, CD28, CD5, ICAM-1, LFA-1 (CD11a/CD18), ICOS (CD278), and 4-1BB (CD137). Further examples of such costimulatory molecules include CD5, ICAM-1, GITR, BAFFR, HVEM (LIGHTR), SLAMF7, NKp80 (KLRF1), NKp44, NKp30, NKp46, CD160, CD19, CD4, CD8alpha, CD8beta, IL2R beta, IL2R gamma, IL7R alpha, ITGA4, VLA1, CD49a, ITGA4, IA4, CD49D, ITGA6, VLA-6, CD49f, ITGAD, CD11d, ITGAE, CD103, ITGAL, CD11a, LFA-1, ITGAM, CD11b, ITGAX, CD11c, ITGB1, CD29, ITGB2, CD18, LFA-1, ITGB7, NKG2D, NKG2C, TNFR2, TRANCE/RANKL, DNAM1 (CD226), SLAMF4 (CD244, 2B4), CD84, CD96 (Tactile), CEACAM1, CRTAM, Ly9 (CD229), CD160 (BY55), PSGL1, CD100 (SEMA4D), CD69, SLAMF6 (NTB-A, Ly108), SLAM (SLAMF1, CD150, IPO-3), BLAME (SLAMF8), SELPLG (CD162), LTBR, LAT, GADS, SLP-76, PAG/Cbp, CD19a, and a ligand that specifically binds with CD83.

[0243] A costimulatory intracellular signaling domain can be the intracellular portion of a costimulatory molecule. A costimulatory molecule can be represented in the following protein families: TNF receptor proteins, Immunoglobulin-like proteins, cytokine receptors, integrins, signaling lymphocytic activation molecules (SLAM proteins), and activating NK cell receptors. Examples of such molecules include CD27, CD28, 4-1BB (CD137), OX40, CD28-OX40, CD28-4-1BB, GITR, CD30, CD40, ICOS, BAFFR, HVEM, ICAM-1, lymphocyte function-associated antigen-1 (LFA-1), CD2, CD5, CD7, CD287, LIGHT, NKG2C, NKG2D, SLAMF7, NKp80, NKp30, NKp44, NKp46, CD160, B7-H3, and a ligand that specifically binds with CD83, and the like.

[0244] The intracellular signaling domain can comprise the entire intracellular portion, or the entire native intracellular signaling domain, of the molecule from which it is derived, or a functional fragment or derivative thereof.

[0245] The term “4-1BB” refers to a member of the TNFR superfamily with an amino acid sequence provided as GenBank Acc. No. AAA62478.2, or the equivalent residues from a non-human species, e.g., mouse, rodent, monkey, ape and the like; and a “4-1BB costimulatory domain” is defined as amino acid residues 214-255 of GenBank Acc. No. AAA62478.2, or the equivalent residues from a non-human species, e.g., mouse, rodent, monkey, ape and the like. In one aspect, the “4-1BB costimulatory domain” is the sequence provided as SEQ ID NO:14 or the equivalent residues from a non-human species, e.g., mouse, rodent, monkey, ape and the like.

[0246] “Immune effector cell,” as that term is used herein, refers to a cell that is involved in an immune response, e.g., in the promotion of an immune effector response. Examples of immune effector cells include T cells, e.g., alpha/beta T cells and gamma/delta T cells, B cells, natural killer (NK) cells, natural killer T (NKT) cells, mast cells, and myeloid-derived phagocytes.

[0247] “Immune effector function or immune effector response,” as that term is used herein, refers to function or response, e.g., of an immune effector cell, that enhances or promotes an immune attack of a target cell. E.g., an immune effector function or response refers a property of a T or NK cell that promotes killing or the inhibition of growth or proliferation, of a target cell. In the case of a T cell, primary stimulation and co-stimulation are examples of immune effector function or response.

[0248] The term “encoding” refers to the inherent property of specific sequences of nucleotides in a polynucleotide, such as a gene, a cDNA, or an mRNA, to serve as templates for synthesis of other polymers and macromolecules in biological processes having either a defined sequence of nucleotides (e.g., rRNA, tRNA and mRNA) or a defined sequence of amino acids and the biological properties resulting therefrom. Thus, a gene, cDNA, or RNA, encodes a protein if transcription and translation of mRNA corresponding to that gene produces the protein in a cell or other biological system. Both the coding strand, the nucleotide sequence of which is identical to the mRNA sequence and is usually provided in sequence listings, and the non-coding strand, used as the template for transcription of a gene or cDNA, can be referred to as encoding the protein or other product of that gene or cDNA.

[0249] Unless otherwise specified, a “nucleotide sequence encoding an amino acid sequence” includes all nucleotide sequences that are degenerate versions of each other and that encode the same amino acid sequence. The phrase nucleotide sequence that encodes a protein or a RNA may also include introns to the extent that the nucleotide sequence encoding the protein may in some version contain an intron(s).

[0250] The term “effective amount” or “therapeutically effective amount” are used interchangeably herein, and refer to an amount of a compound, formulation, material, or composition, as described herein effective to achieve a particular biological result.

[0251] The term “endogenous” refers to any material from or produced inside an organism, cell, tissue or system.

[0252] The term “exogenous” refers to any material introduced from or produced outside an organism, cell, tissue or system.

[0253] The term “expression” refers to the transcription and/or translation of a particular nucleotide sequence driven by a promoter.

[0254] The term “transfer vector” refers to a composition of matter which comprises an isolated nucleic acid and which can be used to deliver the isolated nucleic acid to the interior of a cell. Numerous vectors are known in the art including, but not limited to, linear polynucleotides, polynucleotides associated with ionic or amphiphilic compounds, plasmids, and viruses. Thus, the term “transfer vector” includes an autonomously replicating plasmid or a virus. The term should also be construed to further include non-plasmid and non-viral compounds which facilitate transfer of nucleic acid into cells, such as, for example, a polylysine compound, liposome, and the like. Examples of viral transfer vectors include, but are not limited to, adenoviral vectors, adeno-associated virus vectors, retroviral vectors, lentiviral vectors, and the like.

[0255] The term “expression vector” refers to a vector comprising a recombinant polynucleotide comprising expression control sequences operatively linked to a nucleotide sequence to be expressed. An expression vector comprises sufficient cis-acting elements for expression; other elements for expression can be supplied by the host cell or in an in vitro expression system. Expression vectors include all those known in the art, including cosmids, plasmids (e.g., naked or contained in liposomes) and viruses (e.g., lentiviruses, retroviruses, adenoviruses, and adeno-associated viruses) that incorporate the recombinant polynucleotide.

[0256] The term “lentivirus” refers to a genus of the Retroviridae family Lentiviruses are unique among the retroviruses in being able to infect non-dividing cells; they can deliver a significant amount of genetic information into the DNA of the host cell, so they are one of the most efficient methods of a gene delivery vector. HIV, SIV, and FIV are all examples of lentiviruses.

[0257] The term “lentiviral vector” refers to a vector derived from at least a portion of a lentivirus genome, including especially a self-inactivating lentiviral vector as provided in Milone et al., Mol. Ther. 17(8): 1453-1464 (2009). Other examples of lentivirus vectors that may be used in the clinic, include but are not limited to, e.g., the LENTIVECTOR® gene delivery technology from Oxford BioMedica, the LENTIMAX™ vector system from Lentigen and the like. Nonclinical types of lentiviral vectors are also available and would be known to one skilled in the art.

[0258] The term “homologous” or “identity” refers to the subunit sequence identity between two polymeric molecules, e.g., between two nucleic acid molecules, such as, two DNA molecules or two RNA molecules, or between two polypeptide molecules. When a subunit position in both of the two molecules is occupied by the same monomeric subunit; e.g., if a position in each of two DNA molecules is occupied by adenine, then they are homologous or identical at that position. The homology between two sequences is a direct function of the number of matching or homologous positions; e.g., if half (e.g., five positions in a polymer ten subunits in length) of the positions in two sequences are homologous, the two sequences are 50% homologous; if 90% of the positions (e.g., 9 of 10), are matched or homologous, the two sequences are 90% homologous.

[0259] “Humanized” forms of non-human (e.g., murine) antibodies are chimeric immunoglobulins, immunoglobulin chains or fragments thereof (such as Fv, Fab, Fab′, F(ab′)2 or other antigen-binding subsequences of antibodies) which contain minimal sequence derived from non-human immunoglobulin. For the most part, humanized antibodies and antibody fragments thereof are human immunoglobulins (recipient antibody or antibody fragment) in which residues from a complementary-determining region (CDR) of the recipient are replaced by residues from a CDR of a non-human species (donor antibody) such as mouse, rat or rabbit having the desired specificity, affinity, and capacity. In some instances, Fv framework region (FR) residues of the human immunoglobulin are replaced by corresponding non-human residues. Furthermore, a humanized antibody/antibody fragment can comprise residues which are found neither in the recipient antibody nor in the imported CDR or framework sequences. These modifications can further refine and optimize antibody or antibody fragment performance In general, the humanized antibody or antibody fragment thereof will comprise substantially all of at least one, and typically two, variable domains, in which all or substantially all of the CDR regions correspond to those of a non-human immunoglobulin and all or a significant portion of the FR regions are those of a human immunoglobulin sequence. The humanized antibody or antibody fragment can also comprise at least a portion of an immunoglobulin constant region (Fc), typically that of a human immunoglobulin. For further details, see Jones et al., Nature, 321: 522-525, 1986; Reichmann et al., Nature, 332: 323-329, 1988; Presta, Curr. Op. Struct. Biol., 2: 593-596, 1992.

[0260] “Fully human” refers to an immunoglobulin, such as an antibody or antibody fragment, where the whole molecule is of human origin or consists of an amino acid sequence identical to a human form of the antibody or immunoglobulin.

[0261] The term “isolated” means altered or removed from the natural state. For example, a nucleic acid or a peptide naturally present in a living animal is not “isolated,” but the same nucleic acid or peptide partially or completely separated from the coexisting materials of its natural state is “isolated.” An isolated nucleic acid or protein can exist in substantially purified form, or can exist in a non-native environment such as, for example, a host cell.

[0262] In the context of the present invention, the following abbreviations for the commonly occurring nucleic acid bases are used. “A” refers to adenosine, “C” refers to cytosine, “G” refers to guanosine, “T” refers to thymidine, and “U” refers to uridine.

[0263] The term “operably linked” or “transcriptional control” refers to functional linkage between a regulatory sequence and a heterologous nucleic acid sequence resulting in expression of the latter. For example, a first nucleic acid sequence is operably linked with a second nucleic acid sequence when the first nucleic acid sequence is placed in a functional relationship with the second nucleic acid sequence. For instance, a promoter is operably linked to a coding sequence if the promoter affects the transcription or expression of the coding sequence. Operably linked DNA sequences can be contiguous with each other and, e.g., where necessary to join two protein coding regions, are in the same reading frame.

[0264] The term “parenteral” administration of an immunogenic composition includes, e.g., subcutaneous (s.c.), intravenous (i.v.), intramuscular (i.m.), or intrasternal injection, intratumoral, or infusion techniques.

[0265] The term “nucleic acid”, “nucleic acid molecule,” or “polynucleotide” refers to deoxyribonucleic acids (DNA) or ribonucleic acids (RNA) and polymers thereof in either single- or double-stranded form. Unless specifically limited, the term encompasses nucleic acids containing known analogues of natural nucleotides that have similar binding properties as the reference nucleic acid and are metabolized in a manner similar to naturally occurring nucleotides. Unless otherwise indicated, a particular nucleic acid sequence also implicitly encompasses conservatively modified variants thereof (e.g., degenerate codon substitutions), alleles, orthologs, SNPs, and complementary sequences as well as the sequence explicitly indicated. Specifically, degenerate codon substitutions may be achieved by generating sequences in which the third position of one or more selected (or all) codons is substituted with mixed-base and/or deoxyinosine residues (Batzer et al., Nucleic Acid Res. 19:5081 (1991); Ohtsuka et al., J. Biol. Chem. 260:2605-2608 (1985); and Rossolini et al., Mol. Cell. Probes 8:91-98 (1994)).

[0266] The terms “peptide,” “polypeptide,” and “protein” are used interchangeably, and refer to a compound comprised of amino acid residues covalently linked by peptide bonds.

[0267] A protein or peptide must contain at least two amino acids, and no limitation is placed on the maximum number of amino acids that can comprise a protein's or peptide's sequence. Polypeptides include any peptide or protein comprising two or more amino acids joined to each other by peptide bonds. As used herein, the term refers to both short chains, which also commonly are referred to in the art as peptides, oligopeptides and oligomers, for example, and to longer chains, which generally are referred to in the art as proteins, of which there are many types. “Polypeptides” include, for example, biologically active fragments, substantially homologous polypeptides, oligopeptides, homodimers, heterodimers, variants of polypeptides, modified polypeptides, derivatives, analogs, fusion proteins, among others. A polypeptide includes a natural peptide, a recombinant peptide, or a combination thereof.

[0268] The term “promoter” refers to a DNA sequence recognized by the synthetic machinery of the cell, or introduced synthetic machinery, required to initiate the specific transcription of a polynucleotide sequence.

[0269] The term “promoter/regulatory sequence” refers to a nucleic acid sequence which is required for expression of a gene product operably linked to the promoter/regulatory sequence. In some instances, this sequence may be the core promoter sequence and in other instances, this sequence may also include an enhancer sequence and other regulatory elements which are required for expression of the gene product. The promoter/regulatory sequence may, for example, be one which expresses the gene product in a tissue specific manner.

[0270] The term “constitutive” promoter refers to a nucleotide sequence which, when operably linked with a polynucleotide which encodes or specifies a gene product, causes the gene product to be produced in a cell under most or all physiological conditions of the cell.

[0271] The term “inducible” promoter refers to a nucleotide sequence which, when operably linked with a polynucleotide which encodes or specifies a gene product, causes the gene product to be produced in a cell substantially only when an inducer which corresponds to the promoter is present in the cell.

[0272] The term “tissue-specific” promoter refers to a nucleotide sequence which, when operably linked with a polynucleotide encodes or specified by a gene, causes the gene product to be produced in a cell substantially only if the cell is a cell of the tissue type corresponding to the promoter.

[0273] The terms “cancer associated antigen” or “tumor antigen” interchangeably refers to a molecule (typically a protein, carbohydrate or lipid) that is expressed on the surface of a cancer cell, either entirely or as a fragment (e.g., MHC/peptide), and which is useful for the preferential targeting of a pharmacological agent to the cancer cell. In some embodiments, a tumor antigen is a marker expressed by both normal cells and cancer cells, e.g., a lineage marker, e.g., CD19 on B cells. In some embodiments, a tumor antigen is a cell surface molecule that is overexpressed in a cancer cell in comparison to a normal cell, for instance, 1-fold over expression, 2-fold overexpression, 3-fold overexpression or more in comparison to a normal cell. In some embodiments, a tumor antigen is a cell surface molecule that is inappropriately synthesized in the cancer cell, for instance, a molecule that contains deletions, additions or mutations in comparison to the molecule expressed on a normal cell. In some embodiments, a tumor antigen will be expressed exclusively on the cell surface of a cancer cell, entirely or as a fragment (e.g., MHC/peptide), and not synthesized or expressed on the surface of a normal cell. In some embodiments, the CARs of the present invention includes CARs comprising an antigen binding domain (e.g., antibody or antibody fragment) that binds to a MHC presented peptide. Normally, peptides derived from endogenous proteins fill the pockets of Major histocompatibility complex (MHC) class I molecules, and are recognized by T cell receptors (TCRs) on CD8 + T lymphocytes. The MHC class I complexes are constitutively expressed by all nucleated cells. In cancer, virus-specific and/or tumor-specific peptide/MHC complexes represent a unique class of cell surface targets for immunotherapy. TCR-like antibodies targeting peptides derived from viral or tumor antigens in the context of human leukocyte antigen (HLA)-A1 or HLA-A2 have been described (see, e.g., Sastry et al., J Virol. 2011 85(5):1935-1942; Sergeeva et al., Blood, 2011 117(16):4262-4272; Verma et al., J Immunol 2010 184(4):2156-2165; Willemsen et al., Gene Ther 2001 8(21):1601-1608; Dao et al., Sci Transl Med 2013 5(176):176ra33; Tassev et al., Cancer Gene Ther 2012 19(2):84-100). For example, TCR-like antibody can be identified from screening a library, such as a human scFv phage displayed library.

[0274] The term “tumor-supporting antigen” or “cancer-supporting antigen” interchangeably refer to a molecule (typically a protein, carbohydrate or lipid) that is expressed on the surface of a cell that is, itself, not cancerous, but supports the cancer cells, e.g., by promoting their growth or survival e.g., resistance to immune cells. Exemplary cells of this type include stromal cells and myeloid-derived suppressor cells (MDSCs). The tumor-supporting antigen itself need not play a role in supporting the tumor cells so long as the antigen is present on a cell that supports cancer cells.

[0275] The term “flexible polypeptide linker” or “linker” as used in the context of a scFv refers to a peptide linker that consists of amino acids such as glycine and/or serine residues used alone or in combination, to link variable heavy and variable light chain regions together. In one embodiment, the flexible polypeptide linker is a Gly/Ser linker and comprises the amino acid sequence (Gly-Gly-Gly-Ser)ₙ, where n is a positive integer equal to or greater than 1. For example, n=1, n=2, n=3. n=4, n=5 and n=6, n=7, n=8, n=9 and n=10 (SEQ ID NO:28). In one embodiment, the flexible polypeptide linkers include, but are not limited to, (Gly₄ Ser)₄ (SEQ ID NO:29) or (Gly₄ Ser)₃ (SEQ ID NO:30). In another embodiment, the linkers include multiple repeats of (Gly₂Ser), (GlySer) or (Gly₃Ser) (SEQ ID NO:31). Also included within the scope of the invention are linkers described in WO2012/138475, incorporated herein by reference).

[0276] As used herein, a 5′ cap (also termed an RNA cap, an RNA 7-methylguanosine cap or an RNA m⁷G cap) is a modified guanine nucleotide that has been added to the “front” or 5′ end of a eukaryotic messenger RNA shortly after the start of transcription. The 5′ cap consists of a terminal group which is linked to the first transcribed nucleotide. Its presence is critical for recognition by the ribosome and protection from RNases. Cap addition is coupled to transcription, and occurs co-transcriptionally, such that each influences the other. Shortly after the start of transcription, the 5′ end of the mRNA being synthesized is bound by a cap-synthesizing complex associated with RNA polymerase. This enzymatic complex catalyzes the chemical reactions that are required for mRNA capping. Synthesis proceeds as a multi-step biochemical reaction. The capping moiety can be modified to modulate functionality of mRNA such as its stability or efficiency of translation.

[0277] As used herein, “in vitro transcribed RNA” refers to RNA, preferably mRNA, that has been synthesized in vitro. Generally, the in vitro transcribed RNA is generated from an in vitro transcription vector. The in vitro transcription vector comprises a template that is used to generate the in vitro transcribed RNA.

[0278] As used herein, a “poly(A)” is a series of adenosines attached by polyadenylation to the mRNA. In the preferred embodiment of a construct for transient expression, the polyA is between 50 and 5000 (SEQ ID NO: 34), preferably greater than 64, more preferably greater than 100, most preferably greater than 300 or 400. poly(A) sequences can be modified chemically or enzymatically to modulate mRNA functionality such as localization, stability or efficiency of translation.

[0279] As used herein, “polyadenylation” refers to the covalent linkage of a polyadenylyl moiety, or its modified variant, to a messenger RNA molecule. In eukaryotic organisms, most messenger RNA (mRNA) molecules are polyadenylated at the 3′ end. The 3′ poly(A) tail is a long sequence of adenine nucleotides (often several hundred) added to the pre-mRNA through the action of an enzyme, polyadenylate polymerase. In higher eukaryotes, the poly(A) tail is added onto transcripts that contain a specific sequence, the polyadenylation signal. The poly(A) tail and the protein bound to it aid in protecting mRNA from degradation by exonucleases. Polyadenylation is also important for transcription termination, export of the mRNA from the nucleus, and translation. Polyadenylation occurs in the nucleus immediately after transcription of DNA into RNA, but additionally can also occur later in the cytoplasm. After transcription has been terminated, the mRNA chain is cleaved through the action of an endonuclease complex associated with RNA polymerase. The cleavage site is usually characterized by the presence of the base sequence AAUAAA near the cleavage site. After the mRNA has been cleaved, adenosine residues are added to the free 3′ end at the cleavage site.

[0280] As used herein, “transient” refers to expression of a non-integrated transgene for a period of hours, days or weeks, wherein the period of time of expression is less than the period of time for expression of the gene if integrated into the genome or contained within a stable plasmid replicon in the host cell.

[0281] As used herein, the terms “treat”, “treatment” and “treating” refer to the reduction or amelioration of the progression, severity and/or duration of a proliferative disorder, or the amelioration of one or more symptoms (preferably, one or more discernible symptoms) of a proliferative disorder resulting from the administration of one or more therapies (e.g., one or more therapeutic agents such as a CAR of the invention). In specific embodiments, the terms “treat”, “treatment” and “treating” refer to the amelioration of at least one measurable physical parameter of a proliferative disorder, such as growth of a tumor, not necessarily discernible by the patient. In other embodiments the terms “treat”, “treatment” and “treating”-refer to the inhibition of the progression of a proliferative disorder, either physically by, e.g., stabilization of a discernible symptom, physiologically by, e.g., stabilization of a physical parameter, or both. In other embodiments the terms “treat”, “treatment” and “treating” refer to the reduction or stabilization of tumor size or cancerous cell count.

[0282] The term “signal transduction pathway” refers to the biochemical relationship between a variety of signal transduction molecules that play a role in the transmission of a signal from one portion of a cell to another portion of a cell. The phrase “cell surface receptor” includes molecules and complexes of molecules capable of receiving a signal and transmitting signal across the membrane of a cell.

[0283] The term “subject” is intended to include living organisms in which an immune response can be elicited (e.g., mammals, human)

[0284] The term, a “substantially purified” cell refers to a cell that is essentially free of other cell types. A substantially purified cell also refers to a cell which has been separated from other cell types with which it is normally associated in its naturally occurring state. In some instances, a population of substantially purified cells refers to a homogenous population of cells. In other instances, this term refers simply to cell that have been separated from the cells with which they are naturally associated in their natural state. In some aspects, the cells are cultured in vitro. In other aspects, the cells are not cultured in vitro.

[0285] The term “substantially identical” refers to a relationship between two sequence polymers, e.g., two polypeptides or two nucleic acids, wherein the sequences, e.g., amino acid sequences or nucleic acid sequences, of the two sequence polymers are at least 85%, 90%, 95%, 97%, 98%, or 99% identical to each other.

[0286] The term “variant” refers to a polypeptide that has a substantially identical amino acid sequence to a reference amino acid sequence, or is encoded by a substantially identical nucleotide sequence. In some embodiments, the variant is a functional variant.

[0287] The term “functional variant” refers to a polypeptide that has a substantially identical amino acid sequence to a reference amino acid sequence, or is encoded by a substantially identical nucleotide sequence, and is capable of having one or more activities of the reference amino acid sequence.

[0288] The terms “does not substantially inhibit CAR signaling”, “does not substantially inhibit TCR signaling”, “does not substantially promote immune checkpoint inhibition”, “does not substantially promote PD-1/PD-L1 signaling”, and “does not substantially inhibit phosphorylation of CD3z” refer to a state that is less than 15%, 10%, 5%, 3%, or 1% altered in the relevant parameter relative to a reference state of the relevant parameter. For example, “the expression of a SHP inhibitor polypeptide does not substantially inhibit CAR signaling” means that, in this example, when a SHP inhibitor polypeptide is expressed, CAR signaling is reduced by less than 15%, 10%, 5%, 3%, or 1% when compared to a state where the SHP inhibitor polypeptide is not expressed.

[0289] The term “therapeutic” as used herein means a treatment. A therapeutic effect is obtained by reduction, suppression, remission, or eradication of a disease state.

[0290] The term “prophylaxis” as used herein means the prevention of or protective treatment for a disease or disease state.

[0291] In the context of the present invention, “tumor antigen” or “hyperproliferative disorder antigen” or “antigen associated with a hyperproliferative disorder” refers to antigens that are common to specific hyperproliferative disorders. In certain aspects, the hyperproliferative disorder antigens of the present invention are derived from, cancers including but not limited to primary or metastatic melanoma, thymoma, lymphoma, sarcoma, lung cancer, liver cancer, non-Hodgkin lymphoma, Hodgkin lymphoma, leukemias, uterine cancer, cervical cancer, bladder cancer, kidney cancer and adenocarcinomas such as breast cancer, prostate cancer, ovarian cancer, pancreatic cancer, and the like.

[0292] The term “transfected” or “transformed” or “transduced” refers to a process by which exogenous nucleic acid is transferred or introduced into the host cell. A “transfected” or “transformed” or “transduced” cell is one which has been transfected, transformed or transduced with exogenous nucleic acid. The cell includes the primary subject cell and its progeny.

[0293] The term “specifically binds,” refers to an antibody, or a ligand, which recognizes and binds with a binding partner (e.g., a tumor antigen) protein present in a sample, but which antibody or ligand does not substantially recognize or bind other molecules in the sample.

[0294] “Regulatable chimeric antigen receptor (RCAR),”as that term is used herein, refers to a set of polypeptides, typically two in the simplest embodiments, which when in a RCARX cell, provides the RCARX cell with specificity for a target cell, typically a cancer cell, and with regulatable intracellular signal generation or proliferation, which can optimize an immune effector property of the RCARX cell. An RCARX cell relies at least in part, on an antigen binding domain to provide specificity to a target cell that comprises the antigen bound by the antigen binding domain. In an embodiment, an RCAR includes a dimerization switch that, upon the presence of a dimerization molecule, can couple an intracellular signaling domain to the antigen binding domain.

[0295] “Membrane anchor” or “membrane tethering domain”, as that term is used herein, refers to a polypeptide or moiety, e.g., a myristoyl group, sufficient to anchor an extracellular or intracellular domain to the plasma membrane.

[0296] “Switch domain,” as that term is used herein, e.g., when referring to an RCAR, refers to an entity, typically a polypeptide-based entity, that, in the presence of a dimerization molecule, associates with another switch domain. The association results in a functional coupling of a first entity linked to, e.g., fused to, a first switch domain, and a second entity linked to, e.g., fused to, a second switch domain. A first and second switch domain are collectively referred to as a dimerization switch. In embodiments, the first and second switch domains are the same as one another, e.g., they are polypeptides having the same primary amino acid sequence, and are referred to collectively as a homodimerization switch. In embodiments, the first and second switch domains are different from one another, e.g., they are polypeptides having different primary amino acid sequences, and are referred to collectively as a heterodimerization switch. In embodiments, the switch is intracellular. In embodiments, the switch is extracellular. In embodiments, the switch domain is a polypeptide-based entity, e.g., FKBP or FRB-based, and the dimerization molecule is small molecule, e.g., a rapalogue. In embodiments, the switch domain is a polypeptide-based entity, e.g., an scFv that binds a myc peptide, and the dimerization molecule is a polypeptide, a fragment thereof, or a multimer of a polypeptide, e.g., a myc ligand or multimers of a myc ligand that bind to one or more myc scFvs. In embodiments, the switch domain is a polypeptide-based entity, e.g., myc receptor, and the dimerization molecule is an antibody or fragments thereof, e.g., myc antibody.

[0297] “Dimerization molecule,” as that term is used herein, e.g., when referring to an RCAR, refers to a molecule that promotes the association of a first switch domain with a second switch domain. In embodiments, the dimerization molecule does not naturally occur in the subject, or does not occur in concentrations that would result in significant dimerization. In embodiments, the dimerization molecule is a small molecule, e.g., rapamycin or a rapalogue, e.g., RAD001.

[0298] The term “bioequivalent” refers to an amount of an agent other than the reference compound (e.g., RAD001), required to produce an effect equivalent to the effect produced by the reference dose or reference amount of the reference compound (e.g., RAD001). In an embodiment the effect is the level of mTOR inhibition, e.g., as measured by P70 S6 kinase inhibition, e.g., as evaluated in an in vivo or in vitro assay, e.g., as measured by an assay described herein, e.g., the Boulay assay. In an embodiment, the effect is alteration of the ratio of PD-1 positive/PD-1 negative T cells, as measured by cell sorting. In an embodiment a bioequivalent amount or dose of an mTOR inhibitor is the amount or dose that achieves the same level of P70 S6 kinase inhibition as does the reference dose or reference amount of a reference compound. In an embodiment, a bioequivalent amount or dose of an mTOR inhibitor is the amount or dose that achieves the same level of alteration in the ratio of PD-1 positive/PD-1 negative T cells as does the reference dose or reference amount of a reference compound.

[0299] The term “low, immune enhancing, dose” when used in conjunction with an mTOR inhibitor, e.g., an allosteric mTOR inhibitor, e.g., RAD001 or rapamycin, or a catalytic mTOR inhibitor, refers to a dose of mTOR inhibitor that partially, but not fully, inhibits mTOR activity, e.g., as measured by the inhibition of P70 S6 kinase activity. Methods for evaluating mTOR activity, e.g., by inhibition of P70 S6 kinase, are discussed herein. The dose is insufficient to result in complete immune suppression but is sufficient to enhance the immune response. In an embodiment, the low, immune enhancing, dose of mTOR inhibitor results in a decrease in the number of PD-1 positive T cells and/or an increase in the number of PD-1 negative T cells, or an increase in the ratio of PD-1 negative T cells/PD-1 positive T cells. In an embodiment, the low, immune enhancing, dose of mTOR inhibitor results in an increase in the number of naive T cells. In an embodiment, the low, immune enhancing, dose of mTOR inhibitor results in one or more of the following:

[0300] an increase in the expression of one or more of the following markers: CD62L^{high}, CD127^{high}, CD27⁺, and BCL2, e.g., on memory T cells, e.g., memory T cell precursors; a decrease in the expression of KLRG1, e.g., on memory T cells, e.g., memory T cell precursors; and

[0301] an increase in the number of memory T cell precursors, e.g., cells with any one or combination of the following characteristics: increased CD62L^{high} increased CD127^{high}, increased CD27⁺, decreased KLRG1, and increased BCL2;

[0302] wherein any of the changes described above occurs, e.g., at least transiently, e.g., as compared to a non-treated subject.

[0303] “Refractory” as used herein refers to a disease, e.g., cancer, that does not respond to a treatment. In embodiments, a refractory cancer can be resistant to a treatment before or at the beginning of the treatment. In other embodiments, the refractory cancer can become resistant during a treatment. A refractory cancer is also called a resistant cancer.

[0304] “Relapsed” as used herein refers to the return of a disease (e.g., cancer) or the signs and symptoms of a disease such as cancer after a period of improvement, e.g., after prior treatment of a therapy, e.g., cancer therapy

[0305] Ranges: throughout this disclosure, various aspects of the invention can be presented in a range format. It should be understood that the description in range format is merely for convenience and brevity and should not be construed as an inflexible limitation on the scope of the invention. Accordingly, the description of a range should be considered to have specifically disclosed all the possible subranges as well as individual numerical values within that range. For example, description of a range such as from 1 to 6 should be considered to have specifically disclosed subranges such as from 1 to 3, from 1 to 4, from 1 to 5, from 2 to 4, from 2 to 6, from 3 to 6 etc., as well as individual numbers within that range, for example, 1, 2, 2.7, 3, 4, 5, 5.3, and 6. As another example, a range such as 95-99% identity, includes something with 95%, 96%, 97%, 98% or 99% identity, and includes subranges such as 96-99%, 96-98%, 96-97%, 97-99%, 97-98% and 98-99% identity. This applies regardless of the breadth of the range.

### SHP Inhibitor Molecules

[0306] Provided herein are compositions of matter and methods of use for the treatment of a disease such as cancer using immune effector cells (e.g., T cells, NK cells) engineered with CARs and SHP inhibitor molecules, e.g., SHP inhibitor polypeptides disclosed herein.

[0307] In one aspect, immune effector cells comprising CARs and SHP inhibitor molecules exhibit increased killing of tumor cells, increased cytokine release, and increased tumor infiltration in vitro and in vivo. Assays for said properties are described herein, e.g., in the Examples herein.

[0308] Many inhibitory receptors (IRs) are purported to signal, at least in part, via the enzyme SHP-1 (Thaventhiran T, Sethu S, Yeang H X, Laith A H, Hamdam J, Sathish J G. J Clin Cell Immunol 2012;S12:1-12) (see FIG. 1). The invention pertains, at least in part, on the discovery that interference with SHP, e.g., SHP-1 signaling, can provide an advantageous way to block one or more IRs simultaneously.

[0309] SHP1, known by its two names, Src homology region 2 domain-containing phosphatase-1 and tyrosine-protein phosphatase non-receptor type 6, is an enzyme that is encoded by the PTPN6 gene in humans (Plutzky J, Neel B G, Rosenberg R D, Eddy R L, Byers M G, Jani-Sait S, et al. Genomics 1992 July; 13(3):869-72). SHP1 is a member of the protein tyrosine phosphatase (PTP) family, a family known to regulate various cellular processes (e.g. cell growth, differentiation, mitosis, oncogenic transformation) by removing key phosphorylated tyrosine residues. SHP2, known by its names protein-tyrosine phosphatase 1D (PTP-1D), protein-tyrosine phosphatase 2C (PTP-2C), or tyrosine-protein phosphatase non-receptor type 11 (PTPN11), is a paralogue phosphatase which possesses a similar structure to SHP1, and is widely expressed in most tissues (Qu C K. Cell Res 2000 December; 10(4):279-88).

[0310] SHP1 is expressed primarily in hematopoietic cells where it regulates multiple signaling pathways. One example is the regulation of TCR (T cell receptor) signaling in T cells by SHP1 and SHP2. (Lorenz U. Immunol Rev 2009 March; 228(1):342-59; Hebeisen M, Baitsch L, Presotto D, Baumgaertner P, Romero P, Michielin O, et al. J Clin Invest March; 123(3):1044-56). SHP1 terminates TCR signaling at multiple points along the path of TCR signaling events. For example, it inhibits phosphorylation of CD3z and other adapter proteins (e.g. LAT, linker for activation of T cells) and association of signal-amplifying molecules like Zap70 (Zeta-chain-associated protein kinase 70), and dephosphorylates Lck (lymphocyte-specific protein tyrosine kinase) a key component that assists in signaling from the TCR complex (FIG. 2) (Fawcett V C, Lorenz U J Immunol 2005 Mar. 1; 174(5):2849-59; Sankarshanan M, Ma Z, Iype T, Lorenz U J Immunol 2007 Jul. 1; 179(1):483-90).

[0311] The effects of SHP1 blockade/interference using T cells from genetically engineered mice have been studied, demonstrating increased anti-tumor activity of SHP1(−/−) mouse effector T cells (Stromnes I M, Fowler C, Casamina C C, Georgopolos C M, McAfee M S, Schmitt T M, et al. J Immunol August 15; 189(4):1812-25). The ability to enhance the anti-tumor activity of human T cells using chemical inhibitors like sodium stibogluconate (SSG), an injectable medicine used to treat leshmaniasis, to block SHP1 activity has also been studied (Hebeisen et al.). However, pharmacologic block will likely be limited by side effects, due to the widespread expression and activity of SHP1.

[0312] Detailed molecular information about how SHP1 works was utilized. The catalytic site of SHP1 is normally occupied by the N-terminus of its SH2 domain (SH2-N). This self binding keeps SHP1 in its non-catalytic conformation (Poole A W, Jones M L. A SHPing tale: perspectives on the regulation of SHP-1 and SHP-2 tyrosine phosphatases by the C-terminal tail. Cell Signal 2005 November; 17(11):1323-32). SH2-N releases from the catalytic domain upon recognition of phosphorylated tyrosine motifs (pTyr) on immunoreceptor tyrosine-based inhibition motifs (ITIMs), which are located on the cytoplasmic tails of IRs like PD1 (Yaffe M B. Nat Rev Mol Cell Biol 2002 March; 3(3):177-86; Hampel K, Kaufhold I, Zacharias M, Bohmer F D, Imhof D. ChemMedChem 2006 August; 1(8):869-77) (FIG. 7). Once the SH2-domain binds to the ITIM, the catalytic activity of SHP1 is “released”.

### SHP Inhibitor Polypeptide

[0313] In one aspect, the compositions, methods and uses described herein comprise an SHP inhibitor polypeptide, e.g., an SHP-1 inhibitor polypeptide or an SHP-2 inhibitor polypeptide, e.g., an SHP inhibitor polypeptide that reduces the expression and/or function of SHP, e.g., an SHP inhibitor polypeptide that reduces the function of SHP. In one aspect, the SHP inhibitor polypeptide is a dominant negative mutant of the N-terminal region of SHP-1 or SHP-2.

[0314] The invention pertains, at least in part, to a novel strategy to improve the activity, persistence, and tumoricidal activity of adoptively transferred T cells (as illustrated with CAR-expressing T cells) by cloning in a modified transgene that interrupts the catalytic activity of the phosphatase SHP-1 in T cells. The transgene encodes a small peptide based on the N-terminal region of SHP-1 (N-SH2). The region of N-SH2 that binds to phosphorylated tyrosine motifs (ITIMs) was mutated to produce the peptide called R30K. Co-expression of a CAR and N-SH2-R30K in T cells results in increased killing of tumor cells both in vitro and in vivo, using a mesothelin-targeted CAR as an example.

[0315] Full length wild-type SHP-1 sequence is provided below as SEQ ID NO: 1:

```
                10 20 30 40
MVRWFHRDLS GLDAETLLKG RGVHGSFLAR PSRKNQGDFS
                50 60 70 80
LSVRVGDQVT HIRIQNSGDF YDLYGGEKFA TLTELVEYYT
                90 100 110 120
QQQGVLQDRD GTIIHLKYPL NCSDPTSERW YHGHMSGGQA
              130 140 150 160
ETLLQAKGEP WTFLVRESLS QPGDFVLSVL SDQPKAGPGS
              170 180 190 200
PLRVTHIKVM CEGGRYTVGG LETFDSLTDL VEHFKKTGIE
              210 220 230 240
EASGAFVYLR QPYYATRVNA ADIENRVLEL NKKQESEDTA
              250 260 270 280
KAGFWEEFES LQKQEVKNLH QRLEGQRPEN KGKNRYKNIL
              290 300 310 320
PFDHSRVILQ GRDSNIPGSD YINANYIKNQ LLGPDENAKT
              330 340 350 360
YIASQGCLEA TVNDFWQMAW QENSRVIVMT TREVEKGRNK
              370 380 390 400
CVPYWPEVGM QRAYGPYSVT NCGEHDTTEY KLRTLQVSPL
              410 420 430 440
DNGDLIREIW HYQYLSWPDH GVPSEPGGVL SFLDQINQRQ
              450 460 470 480
ESLPHAGPII VHCSAGIGRT GTIIVIDMLM ENISTKGLDC
              490 500 510 520
DIDIQKTIQM VRAQRSGMVQ TEAQYKFIYV AIAQFIETTK
              530 540 550 560
KKLEVLQSQK GQESEYGNIT YPPAMKNAHA KASRTSSKHK
              570 580 590
EDVYENLHTK NKREEKVKKQ RSADKEKSKG SLKRK
```

[0316] With respect to SEQ ID NO: 1, in some embodiments, amino acids 4-100 constitute the N-terminal SH2 domain (also called the SH2 1 domain); amino acids 110-213 constitute the C-terminal SH2 domain (also called the SH2 2 domain), and amino acids 244-515 constitute the catalytic domain, e.g., the phosphatase domain.

[0317] Full length wild-type SHP-2 sequence is provided below as SEQ ID NO: 2:

```
                10 20 30 40
MTSRRWFHPN ITGVEAENLL LTRGVDGSFL ARPSKSNPGD
                50 60 70 80
FTLSVRRNGA VTHIKIQNTG DYYDLYGGEK FATLAELVQY
                90 100 110 120
YMEHHGQLKE KNGDVIELKY PLNCADPTSE RWFHGHLSGK
              130 140 150 160
EAEKLLTEKG KHGSFLVRES QSHPGDFVLS VRTGDDKGES
              170 180 190 200
NDGKSKVTHV MIRCQELKYD VGGGERFDSL TDLVEHYKKN
              210 220 230 240
PMVETLGTVL QLKQPLNTTR INAAEIESRV RELSKLAETT
              250 260 270 280
DKVKQGFWEE FETLQQQECK LLYSRKEGQR QENKNKNRYK
              290 300 310 320
NILPFDHTRV VLHDGDPNEP VSDYINANII MPEFETKCNN
              330 340 350 360
SKPKKSYIAT QGCLQNTVND FWRMVFQENS RVIVMTTKEV
              370 380 390 400
ERGKSKCVKY WPDEYALKEY GVMRVRNVKE SAAHDYTLRE
              410 420 430 440
LKLSKVGQAL LQGNTERTVW QYHFRTWPDH GVPSDPGGVL
              450 460 470 480
DFLEEVHHKQ ESIMDAGPVV VHCSAGIGRT GTFIVIDILI
              490 500 510 520
DIIREKGVDC DIDVPKTIQM VRSQRSGMVQ TEAQYRFIYM
              530 540 550 560
AVQHYIETLQ RRIEEEQKSK RKGHEYTNIK YSLADQTSGD
              570 580 590
QSPLPPCTPT PPCAEMREDS ARVYENVGLM QQQKSFR
```

[0318] With respect to SEQ ID NO: 2, in some embodiments, amino acids 6-102 constitute the N-terminal SH2 domain (also called the SH2 1 domain); amino acids 112-216 constitute the C-terminal SH2 domain (also called the SH2 1 domain), and amino acids 247-521 constitute the catalytic domain, e.g., the phosphatase domain.

[0319] A 100 amino acid N-terminal SHP-1 fragment, wherein amino acid 30 can be any amino acid, is provided below as SEQ ID NO: 3:

```
                10 20 30 40
MVRWFHRDLS GLDAETLLKG RGVHGSFLAX PSRKNQGDFS
                50 60 70 80
LSVRVGDQVT HIRIQNSGDF YDLYGGEKFA TLTELVEYYT
                90 100
QQQGVLQDRD GTIIHLKYPL
```

[0320] The amino acid sequence of a wild-type SHP-1 SH2-N peptide is provided below and in FIG. 8 as SEQ ID NO: 40:

MVRWFHRDLSGLDAETLLKGRGVHGSFLARPSRKNQGDFSLSVRVGDQVT
HIRIQNSGDFYDLYGGEKFATLTELVEYYTQQQGVLQDRDGTIIHLKYPL

[0321] The amino acid sequence of an SHP-1 SH2-N R30K peptide is provided below and in FIG. 8 as SEQ ID NO: 41:

MVRWFHRDLSGLDAETLLKGRGVHGSFLAKPSRKNQGDFSLSVRVGDQVT
HIRIQNSGDFYDLYGGEKFATLTELVEYYTQQQGVLQDRDGTIIHLKYPL

[0322] The amino acid sequence of an SHP-1 SH2-N R3OH peptide is provided below as SEQ ID NO: 42:

MVRWFHRDLSGLDAETLLKGRGVHGSFLAHPSRKNQGDFSLSVRVGDQVT
HIRIQNSGDFYDLYGGEKFATLTELVEYYTQQQGVLQDRDGTIIHLKYPL

[0323] A 102 amino acid N-terminal SHP-2 fragment, wherein amino acid 32 can be any amino acid, is provided below as SEQ ID NO: 4:

```
                10 20 30 40
MTSRRWFHPN ITGVEAENLL LTRGVDGSFL AXPSKSNPGD
                50 60 70 80
FTLSVRRNGA VTHIKIQNTG DYYDLYGGEK FATLAELVQY
                90 100 110 120
YMEHHGQLKE KNGDVIELKY PL
130 140 150
```

[0324] The amino acid sequence of a wild-type SHP-2 SH2-N peptide is provided below as SEQ ID NO: 43:

MTSRRWFHPNITGVEAENLLLTRGVDGSFLARPSKSNPGDFTLSVRRNGA
VTHIKIQNTGDYYDLYGGEKFATLAELVQYYMEHHGQLKEKNGDVIELKY
PL

[0325] The amino acid sequence of an SHP-2 SH2-N R32K peptide is provided below as SEQ ID NO: 44:

MTSRRWFHPNITGVEAENLLLTRGVDGSFLAKPSKSNPGDFTLSVRRNGA
VTHIKIQNTGDYYDLYGGEKFATLAELVQYYMEHHGQLKEKNGDVIELKY
PL

[0326] The amino acid sequence of an SHP-2 SH2-N R32H peptide is provided below as SEQ ID NO: 45:

MTSRRWFHPNITGVEAENLLLTRGVDGSFLAHPSKSNPGDFTLSVRRNGA
VTHIKIQNTGDYYDLYGGEKFATLAELVQYYMEHHGQLKEKNGDVIELKY
PL

[0327] An alternative N-terminal SHP-2 fragment, wherein amino acid 32 can be any amino acid, is provided below as SEQ ID NO: 46:

MTSRRWFHPNITGVEAENLLLTRGVDGSFLAXSKSNPGDFTLSVRRNGA
VTHIKIQNTGDYYDLYGGEKFATLAELVQYYMEHHGQLKEKNGDVIELKY
PL

[0328] In one aspect, the invention provides a number of chimeric antigen receptors (CAR) comprising an antigen binding domain (e.g., antibody or antibody fragment, TCR or TCR fragment) engineered for specific binding to a tumor antigen, e.g., a tumor antigen described herein. In one aspect, the invention provides an immune effector cell (e.g., T cell, NK cell) engineered to express a CAR and an SHP inhibitor polypeptide, wherein the engineered immune effector cell exhibits an anticancer property. In one aspect, a cell is transformed with the CAR and the SHP inhibitor polypeptide, and the CAR is expressed on the cell surface. In some embodiments, the cell (e.g., T cell, NK cell) is transduced with a viral vector encoding a CAR and a SHP inhibitor polypeptide. In some embodiments, the viral vector is a retroviral vector. In some embodiments, the viral vector is a lentiviral vector. In some such embodiments, the cell may stably express the CAR and SHP inhibitor polypeptide. In another embodiment, the cell (e.g., T cell, NK cell) is transfected with a nucleic acid, e.g., mRNA, cDNA, DNA, encoding a CAR and a SHP inhibitor polypeptide. In some such embodiments, the cell may transiently express the CAR and SHP inhibitor polypeptide. In some embodiments, the SHP inhibitor polypeptide comprises or consists of the amino acid sequence of SEQ ID NO: 3, 4, 41, 42, 44, or 45 (or a sequence at least about 85%, 90%, 95%, 99% or more identical thereto, and/or having one, two, three or more substitutions, insertions, deletions, or modifications).

[0329] In one aspect, immune effector cells engineered to co-express a CAR and an SHP inhibitor polypeptide can be administered to a patient in conjunction with one or more additional SHP inhibitory agent(s). In embodiments, the additional SHP inhibitory agent(s) may be selected from small molecules, nucleic acids, or polypeptides. In an embodiment, the additional SHP inhibitory agent is sodium stibogluconate (SSG). In an embodiment, the additional SHP inhibitory agent(s) is administered simultaneously with the engineered immune effector cells. In an embodiment, the additional SHP inhibitory agent(s) is administered a time period X prior to or after the engineered immune effector cells are administered, where time period X is 1, 2, 3, 4, 5, 6, 7, 8, 9, 10, 11, 12, 13, 14, 15, 16, 17, 18, 19, 20, 21, 22, 23, or 24 hours, or 1, 2, 3, 4, 5, 6, 7, 8, 9, 10, 11, 12, 13, 14, 15, 16, 17, 18, 19, 20, 21, 22, 23, 24, 25, 26, 27, 28, 29, or 30 days.

### Gene Editing Systems Targeting SHP

[0330] In one aspect, gene editing systems can be used as inhibitors of SHP. Also contemplated by the present invention are the uses of a nucleic acid molecule encoding one or more components of a gene editing system targeting SHP.

### CRISPR/Cas9 Gene Editing Systems

[0331] Naturally-occurring CRISPR/Cas systems are found in approximately 40% of sequenced eubacteria genomes and 90% of sequenced archaea. Grissa et al. (2007) BMC Bioinformatics 8: 172. This system is a type of prokaryotic immune system that confers resistance to foreign genetic elements such as plasmids and phages and provides a form of acquired immunity. Barrangou et al. (2007) Science 315: 1709-1712; Marragini et al. (2008) Science 322: 1843-1845.

[0332] The CRISPR/Cas system has been modified for use in gene editing (silencing, enhancing or changing specific genes) in eukaryotes such as mice or primates. Wiedenheft et al. (2012) Nature 482: 331-8. This is accomplished by, for example, introducing into the eukaryotic cell a plasmid containing a specifically designed CRISPR and one or more appropriate Cas. In other embodiments, the reagents can also be introduced into the cell directly, e.g., gRNA molecule and Cas protein (e.g., precomplexed as a ribonuclear protein complex (RNP)).

[0333] The CRISPR sequence, sometimes called a CRISPR locus, comprises alternating repeats and spacers. In a naturally-occurring CRISPR, the spacers usually comprise sequences foreign to the bacterium such as a plasmid or phage sequence. In an exemplary CRISPR/Cas system targeting SHP1 or SHP2, the spacers are derived from the gene sequence of SHP1 or SHP2, or a sequence of its regulatory elements. In other exemplary embodiments, an engineered CRISPR/Cas system selected for SHP1 or SHP2 may be utilized which comprises a gRNA molecule comprising a targeting domain sequence complementary to a target sequence of a SHP1 or SHP2 gene or regulatory element, and comprising a Cas molecule, for example a Cas9 molecule such as S. pyogenes Cas9.

[0334] RNA from the CRISPR locus is constitutively expressed and processed into small RNAs. These comprise a spacer flanked by a repeat sequence. The RNAs guide other Cas proteins to silence exogenous genetic elements at the RNA or DNA level. Horvath et al. (2010) Science 327: 167-170; Makarova et al. (2006) Biology Direct 1: 7. The spacers thus serve as templates for RNA molecules, analogously to siRNAs. Pennisi (2013) Science 341: 833-836.

[0335] As these naturally occur in many different types of bacteria, the exact arrangements of the CRISPR and structure, function and number of Cas genes and their product differ somewhat from species to species. Haft et al. (2005) PLoS Comput. Biol. 1: e60; Kunin et al. (2007) Genome Biol. 8: R61; Mojica et al. (2005) J. Mol. Evol. 60: 174-182; Bolotin et al. (2005) Microbiol. 151: 2551-2561; Pourcel et al. (2005) Microbiol. 151: 653-663; and Stern et al. (2010) Trends. Genet. 28: 335-340. For example, the Cse (Cas subtype, E. coli) proteins (e.g., CasA) form a functional complex, Cascade, that processes CRISPR RNA transcripts into spacer-repeat units that Cascade retains. Brouns et al. (2008) Science 321: 960-964. In other prokaryotes, Cas6 processes the CRISPR transcript. The CRISPR-based phage inactivation in E. coli requires Cascade and Cas3, but not Cas1 or Cas2. The Cmr (Cas RAMP module) proteins in Pyrococcus furiosus and other prokaryotes form a functional complex with small CRISPR RNAs that recognizes and cleaves complementary target RNAs. A simpler CRISPR system relies on the protein Cas9, which is a nuclease with two active cutting sites, one for each strand of the double helix. Combining Cas9 and modified CRISPR locus RNA can be used in a system for gene editing. Pennisi (2013) Science 341: 833-836.

[0336] The CRISPR/Cas system can thus be used to modify, e.g., delete one or more nucleic acids, e.g., a gene encoding SHP1 or SHP2, or a regulatory element of a gene encoding SHP1 or SHP2, or introduce a premature stop which thus decreases expression of a functional SHP1 or SHP2. The CRISPR/Cas system can alternatively be used like RNA interference, turning off a gene encoding SHP1 or SHP2 in a reversible fashion. In a mammalian cell, for example, the RNA can guide the Cas protein to a promoter of a gene encoding SHP1 or SHP2, sterically blocking RNA polymerases.

[0337] CRISPR/Cas systems for gene editing in eukaryotic cells typically involve (1) a guide RNA molecule (gRNA) comprising a targeting domain (which is capable of hybridizing to the genomic DNA target sequence), and sequence which is capable of binding to a Cas, e.g., Cas9 enzyme, and (2) a Cas, e.g., Cas9, protein. The targeting domain and the sequence which is capable of binding to a Cas, e.g., Cas9 enzyme, may be disposed on the same or different molecules. If disposed on different molecules, each includes a hybridization domain which allows the molecules to associate, e.g., through hybridization.

[0338] Artificial CRISPR/Cas systems can be generated which inhibit a gene encoding SHP1 or SHP2, using technology known in the art, e.g., that are described in WO2017093969, herein incorporated by reference in its entirety.

[0339] Other artificial CRISPR/Cas systems that are known in the art may also be generated which inhibit a gene encoding SHP1 or SHP2, e.g., that described in U.S. Publication No. 20140068797, WO2015/048577, Cong (2013) Science 339: 819-823, Tsai (2014) Nature Biotechnol., 32:6 569-576, U.S. Pat. Nos. 8,871,445; 8,865,406; 8,795,965; 8,771,945; and 8,697,359, the contents of which are hereby incorporated by reference in their entirety. Such systems can be generated which inhibit a gene encoding SHP1 or SHP2, by, for example, engineering a CRISPR/Cas system to include a gRNA molecule comprising a targeting domain that hybridizes to a sequence of a target gene, e.g., a gene encoding SHP1 or SHP2. In embodiments, the gRNA comprises a targeting domain which is fully complementarity to 15-25 nucleotides, e.g., 20 nucleotides, of a target gene, e.g., a gene encoding SHP1 or SHP2. In embodiments, the 15-25 nucleotides, e.g., 20 nucleotides, of a target gene, e.g., a gene encoding SHP1 or SHP2, are disposed immediately 5′ to a protospacer adjacent motif (PAM) sequence recognized by the Cas protein of the CRISPR/Cas system (e.g., where the system comprises a S. pyogenes Cas9 protein, the PAM sequence comprises NGG, where N can be any of A, T, G or C).

[0340] In an embodiment, the CRISPR/Cas system of the present invention comprises Cas9, e.g., S. pyogenes Cas9, and a gRNA comprising a targeting domain which hybridizes to a sequence of a gene encoding SHP1 or SHP2. In an embodiment, the CRISPR/Cas system comprises a nucleic acid encoding a gRNA specific for a gene encoding SHP1 or SHP2, and a nucleic acid encoding a Cas protein, e.g., Cas9, e.g., S. pyogenes Cas9. In an embodiment, the CRISPR/Cas system comprises a gRNA specific for a gene encoding SHP1 or SHP2, and a nucleic acid encoding a Cas protein, e.g., Cas9, e.g., S. pyogenes Cas9.

[0341] In one embodiment, the gene editing system is a CRISPR system comprising one or more gRNA molecules targeting a nucleic acid molecule encoding SHP2 or a regulatory element of a nucleic acid molecule encoding SHP2, e.g., a gene encoding SHP2 or a regulatory element of a gene encoding SHP2. In one embodiment, the gene editing system is a CRISPR system comprising one or more gRNA molecules targeting the exon of SHP2. In one embodiment, the gene editing system is a CRISPR system comprising one or more gRNA molecules targeting a genomic location provided in column 4 of Table 19. In one embodiment, the gene editing system is a CRISPR system comprising one or more gRNA molecules targeting a genomic target sequence provided in column 6 of Table 19, or a portion thereof.

[0342] In one embodiment, the gene editing system is a CRISPR system comprising one or more gRNA molecules. In one embodiment, the gRNA molecule comprises a tracr and a crRNA, wherein the crRNA comprises a targeting domain that is complementary with a target sequence of SHP2, e.g., human SHP2. In one embodiment, the targeting domain comprises any nucleotide sequence provided in column 5 of Table 19. In one embodiment, the targeting domain comprises or consists of 17, 18, 19, 20, 21, 22, 23, or 24 consecutive nucleic acids of any nucleotide sequence provided in column 5 of Table 19. In one embodiment, the 17, 18, 19, 20, 21, 22, 23, or 24 consecutive nucleic acids of any nucleotide sequence provided in column 5 of Table 19 are the 17, 18, 19, 20, 21, 22, 23, or 24 consecutive nucleic acids disposed at the 3′ end of the recited nucleotide sequence provided in column 5 of Table 19. In one embodiment, the 17, 18, 19, 20, 21, 22, 23, or 24 consecutive nucleic acids of any nucleotide sequence provided in column 5 of Table 19 are the 17, 18, 19, 20, 21, 22, 23, or 24 consecutive nucleic acids disposed at the 5′ end of the recited nucleotide sequence provided in column 5 of Table 19. In one embodiment, the 17, 18, 19, 20, 21, 22, 23, or 24 consecutive nucleic acids of any nucleotide sequence provided in column 5 of Table 19 do not comprise either the 5′ or 3′ nucleic acid of the recited nucleotide sequence provided in column 5 of Table 19.

TABLE 19
gRNAs targeting SHP2

| | Column 2 | | Column 4 | Column 5 | | Column 6 | |
|---|---|---|---|---|---|---|---|
| Column 1 | Target | Column 3 | Genomic | gRNA targeting | SEQ | Genomic target | SEQ ID |
| Target | region | Strand | location (hg38) | domain sequence | ID NO | sequence | NO |
| PTPN11 | EXON | + | chr12: 112418712-112418737 | GCGCGCAGCU | 1946 | GCGCGCAGC | 2698 |
| | | | | CACACCUGGC | | TCACACCTG | |
| | | | | GGCCG | | GCGGCCG | |
| PTPN11 | EXON | + | chr12: 112418720-112418745 | CUCACACCUG | 1947 | CTCACACCT | 2699 |
| | | | | GCGGCCGCGG | | GGCGGCCGC | |
| | | | | UUUCC | | GGTTTCC | |
| PTPN11 | EXON | + | chr12: 112418723-112418748 | ACACCUGGCG | 1948 | ACACCTGGC | 2700 |
| | | | | GCCGCGGUU | | GGCCGCGGT | |
| | | | | UCCAGG | | TTCCAGG | |
| PTPN11 | EXON | + | chr12: 112418731-112418756 | CGGCCGCGGU | 1949 | CGGCCGCGG | 2701 |
| | | | | UUCCAGGAG | | TTTCCAGGA | |
| | | | | GAAGCA | | GGAAGCA | |
| PTPN11 | EXON | + | chr12: 112418740-112418765 | UUUCCAGGA | 1950 | TTTCCAGGA | 2702 |
| | | | | GGAAGCAAG | | GGAAGCAAG | |
| | | | | GAUGCUU | | GATGCTT | |
| PTPN11 | EXON | + | chr12: 112418753-112418778 | GCAAGGAUG | 1951 | GCAAGGATG | 2703 |
| | | | | CUUUGGACA | | CTTTGGACA | |
| | | | | CUGUGCG | | CTGTGCG | |
| PTPN11 | EXON | + | chr12: 112418764-112418789 | UUGGACACU | 1952 | TTGGACACT | 2704 |
| | | | | GUGCGUGGC | | GTGCGTGGC | |
| | | | | GCCUCCG | | GCCTCCG | |
| PTPN11 | EXON | + | chr12: 112418787-112418812 | CGCGGAGCCC | 1953 | CGCGGAGCC | 2705 |
| | | | | CCGCGCUGCC | | CCCGCGCTG | |
| | | | | AUUCC | | CCATTCC | |
| PTPN11 | EXON | + | chr12: 112418798-112418823 | CGCGCUGCCA | 1954 | CGCGCTGCC | 2706 |
| | | | | UUCCCGGCCG | | ATTCCCGGC | |
| | | | | UCGCU | | CGTCGCT | |
| PTPN11 | EXON | + | chr12: 112418812-112418837 | CGGCCGUCGC | 1955 | CGGCCGTCG | 2707 |
| | | | | UCGGUCCUCC | | CTCGGTCCT | |
| | | | | GCUGA | | CCGCTGA | |
| PTPN11 | EXON | + | chr12: 112418813-112418838 | GGCCGUCGCU | 1956 | GGCCGTCGC | 2708 |
| | | | | CGGUCCUCCG | | TCGGTCCTC | |
| | | | | CUGAC | | CGCTGAC | |
| PTPN11 | EXON | + | chr12: 112418820-112418845 | GCUCGGUCCU | 1957 | GCTCGGTCC | 2709 |
| | | | | CCGCUGACGG | | TCCGCTGAC | |
| | | | | GAAGC | | GGGAAGC | |
| PTPN11 | EXON | + | chr12: 112418826-112418851 | UCCUCCGCUG | 1958 | TCCTCCGCT | 2710 |
| | | | | ACGGGAAGC | | GACGGGAAG | |
| | | | | AGGAAG | | CAGGAAG | |
| PTPN11 | EXON | + | chr12: 112418829-112418854 | UCCGCUGACG | 1959 | TCCGCTGAC | 2711 |
| | | | | GGAAGCAGG | | GGGAAGCAG | |
| | | | | AAGUGG | | GAAGTGG | |
| PTPN11 | EXON | + | chr12: 112418832-112418857 | GCUGACGGG | 1960 | GCTGACGGG | 2712 |
| | | | | AAGCAGGAA | | AAGCAGGAA | |
| | | | | GUGGCGG | | GTGGCGG | |
| PTPN11 | EXON | + | chr12: 112418833-112418858 | CUGACGGGA | 1961 | CTGACGGGA | 2713 |
| | | | | AGCAGGAAG | | AGCAGGAAG | |
| | | | | UGGCGGC | | TGGCGGC | |
| PTPN11 | EXON | + | chr12: 112418845-112418870 | AGGAAGUGG | 1962 | AGGAAGTGG | 2714 |
| | | | | CGGCGGGCG | | CGGCGGGCG | |
| | | | | UCGCGAG | | TCGCGAG | |
| PTPN11 | EXON | + | chr12: 112418856-112418881 | GCGGGCGUC | 1963 | GCGGGCGTC | 2715 |
| | | | | GCGAGCGGU | | GCGAGCGGT | |
| | | | | GACAUCA | | GACATCA | |
| PTPN11 | EXON | + | chr12: 112418857-112418882 | CGGGCGUCGC | 1964 | CGGGCGTCG | 2716 |
| | | | | GAGCGGUGA | | CGAGCGGTG | |
| | | | | CAUCAC | | ACATCAC | |
| PTPN11 | EXON | + | chr12: 112418858-112418883 | GGGCGUCGC | 1965 | GGGCGTCGC | 2717 |
| | | | | GAGCGGUGA | | GAGCGGTGA | |
| | | | | CAUCACG | | CATCACG | |
| PTPN11 | EXON | + | chr12: 112418859-112418884 | GGCGUCGCG | 1966 | GGCGTCGCG | 2718 |
| | | | | AGCGGUGAC | | AGCGGTGAC | |
| | | | | AUCACGG | | ATCACGG | |
| PTPN11 | EXON | + | chr12: 112418865-112418890 | GCGAGCGGU | 1967 | GCGAGCGGT | 2719 |
| | | | | GACAUCACG | | GACATCACG | |
| | | | | GGGGCGA | | GGGGCGA | |
| PTPN11 | EXON | + | chr12: 112418868-112418893 | AGCGGUGAC | 1968 | AGCGGTGAC | 2720 |
| | | | | AUCACGGGG | | ATCACGGGG | |
| | | | | GCGACGG | | GCGACGG | |
| PTPN11 | EXON | + | chr12: 112418874-112418899 | GACAUCACG | 1969 | GACATCACG | 2721 |
| | | | | GGGGCGACG | | GGGGCGACG | |
| | | | | GCGGCGA | | GCGGCGA | |
| PTPN11 | EXON | + | chr12: 112418875-112418900 | ACAUCACGG | 1970 | ACATCACGG | 2722 |
| | | | | GGGCGACGG | | GGGCGACGG | |
| | | | | CGGCGAA | | CGGCGAA | |
| PTPN11 | EXON | + | chr12: 112418878-112418903 | UCACGGGGG | 1971 | TCACGGGGG | 2723 |
| | | | | CGACGGCGGC | | CGACGGCGG | |
| | | | | GAAGGG | | CGAAGGG | |
| PTPN11 | EXON | + | chr12: 112418879-112418904 | CACGGGGGC | 1972 | CACGGGGGC | 2724 |
| | | | | GACGGCGGC | | GACGGCGGC | |
| | | | | GAAGGGC | | GAAGGGC | |
| PTPN11 | EXON | + | chr12: 112418880-112418905 | ACGGGGGCG | 1973 | ACGGGGGCG | 2725 |
| | | | | ACGGCGGCG | | ACGGCGGCG | |
| | | | | AAGGGCG | | AAGGGCG | |
| PTPN11 | EXON | + | chr12: 112418881-112418906 | CGGGGGCGA | 1974 | CGGGGGCGA | 2726 |
| | | | | CGGCGGCGA | | CGGCGGCGA | |
| | | | | AGGGCGG | | AGGGCGG | |
| PTPN11 | EXON | + | chr12: 112418884-112418909 | GGGCGACGG | 1975 | GGGCGACGG | 2727 |
| | | | | CGGCGAAGG | | CGGCGAAGG | |
| | | | | GCGGGGG | | GCGGGGG | |
| PTPN11 | EXON | + | chr12: 112418887-112418912 | CGACGGCGGC | 1976 | CGACGGCGG | 2728 |
| | | | | GAAGGGCGG | | CGAAGGGCG | |
| | | | | GGGCGG | | GGGGCGG | |
| PTPN11 | EXON | + | chr12: 112418890-112418915 | CGGCGGCGA | 1977 | CGGCGGCGA | 2729 |
| | | | | AGGGCGGGG | | AGGGCGGGG | |
| | | | | GCGGAGG | | GCGGAGG | |
| PTPN11 | EXON | + | chr12: 112418900-112418925 | GGGCGGGGG | 1978 | GGGCGGGGG | 2730 |
| | | | | CGGAGGAGG | | CGGAGGAGG | |
| | | | | AGCGAGC | | AGCGAGC | |
| PTPN11 | EXON | + | chr12: 112418901-112418926 | GGCGGGGGC | 1979 | GGCGGGGGC | 2731 |
| | | | | GGAGGAGGA | | GGAGGAGGA | |
| | | | | GCGAGCC | | GCGAGCC | |
| PTPN11 | EXON | + | chr12: 112418905-112418930 | GGGGCGGAG | 1980 | GGGGCGGAG | 2732 |
| | | | | GAGGAGCGA | | GAGGAGCGA | |
| | | | | GCCGGGC | | GCCGGGC | |
| PTPN11 | EXON | + | chr12: 112418906-112418931 | GGGCGGAGG | 1981 | GGGCGGAGG | 2733 |
| | | | | AGGAGCGAG | | AGGAGCGAG | |
| | | | | CCGGGCC | | CCGGGCC | |
| PTPN11 | EXON | + | chr12: 112418907-112418932 | GGCGGAGGA | 1982 | GGCGGAGGA | 2734 |
| | | | | GGAGCGAGC | | GGAGCGAGC | |
| | | | | CGGGCCG | | CGGGCCG | |
| PTPN11 | EXON | + | chr12: 112418908-112418933 | GCGGAGGAG | 1983 | GCGGAGGAG | 2735 |
| | | | | GAGCGAGCC | | GAGCGAGCC | |
| | | | | GGGCCGG | | GGGCCGG | |
| PTPN11 | EXON | + | chr12: 112418909-112418934 | CGGAGGAGG | 1984 | CGGAGGAGG | 2736 |
| | | | | AGCGAGCCG | | AGCGAGCCG | |
| | | | | GGCCGGG | | GGCCGGG | |
| PTPN11 | EXON | + | chr12: 112418927-112418952 | GGCCGGGGG | 1985 | GGCCGGGGG | 2737 |
| | | | | GCAGCUGCAC | | GCAGCTGCA | |
| | | | | AGUCUC | | CAGTCTC | |
| PTPN11 | EXON | + | chr12: 112418928-112418953 | GCCGGGGGG | 1986 | GCCGGGGGG | 2738 |
| | | | | CAGCUGCACA | | CAGCTGCAC | |
| | | | | GUCUCC | | AGTCTCC | |
| PTPN11 | EXON | + | chr12: 112418937-112418962 | CAGCUGCACA | 1987 | CAGCTGCAC | 2739 |
| | | | | GUCUCCGGG | | AGTCTCCGG | |
| | | | | AUCCCC | | GATCCCC | |
| PTPN11 | EXON | + | chr12: 112418942-112418967 | GCACAGUCUC | 1988 | GCACAGTCT | 2740 |
| | | | | CGGGAUCCCC | | CCGGGATCC | |
| | | | | AGGCC | | CCAGGCC | |
| PTPN11 | EXON | + | chr12: 112418945-112418970 | CAGUCUCCGG | 1989 | CAGTCTCCG | 2741 |
| | | | | GAUCCCCAGG | | GGATCCCCA | |
| | | | | CCUGG | | GGCCTGG | |
| PTPN11 | EXON | + | chr12: 112418946-112418971 | AGUCUCCGG | 1990 | AGTCTCCGG | 2742 |
| | | | | GAUCCCCAGG | | GATCCCCAG | |
| | | | | CCUGGA | | GCCTGGA | |
| PTPN11 | EXON | + | chr12: 112418947-112418972 | GUCUCCGGG | 1991 | GTCTCCGGG | 2743 |
| | | | | AUCCCCAGGC | | ATCCCCAGG | |
| | | | | CUGGAG | | CCTGGAG | |
| PTPN11 | EXON | + | chr12: 112418948-112418973 | UCUCCGGGA | 1992 | TCTCCGGGA | 2744 |
| | | | | UCCCCAGGCC | | TCCCCAGGC | |
| | | | | UGGAGG | | CTGGAGG | |
| PTPN11 | EXON | + | chr12: 112418949-112418974 | CUCCGGGAUC | 1993 | CTCCGGGAT | 2745 |
| | | | | CCCAGGCCUG | | CCCCAGGCC | |
| | | | | GAGGG | | TGGAGGG | |
| PTPN11 | EXON | + | chr12: 112418960-112418985 | CCAGGCCUGG | 1994 | CCAGGCCTG | 2746 |
| | | | | AGGGGGGUC | | GAGGGGGGT | |
| | | | | UGUGCG | | CTGTGCG | |
| PTPN11 | EXON | + | chr12: 112418964-112418989 | GCCUGGAGG | 1995 | GCCTGGAGG | 2747 |
| | | | | GGGGUCUGU | | GGGGTCTGT | |
| | | | | GCGCGGC | | GCGCGGC | |
| PTPN11 | EXON | + | chr12: 112418968-112418993 | GGAGGGGGG | 1996 | GGAGGGGGG | 2748 |
| | | | | UCUGUGCGC | | TCTGTGCGC | |
| | | | | GGCCGGC | | GGCCGGC | |
| PTPN11 | EXON | + | chr12: 112418985-112419010 | CGGCCGGCUG | 1997 | CGGCCGGCT | 2749 |
| | | | | GCUCUGCCCC | | GGCTCTGCC | |
| | | | | GCGUC | | CCGCGTC | |
| PTPN11 | EXON | + | chr12: 112418995-112419020 | GCUCUGCCCC | 1998 | GCTCTGCCC | 2750 |
| | | | | GCGUCCGGUC | | CGCGTCCGG | |
| | | | | CCGAG | | TCCCGAG | |
| PTPN11 | EXON | + | chr12: 112418996-112419021 | CUCUGCCCCG | 1999 | CTCTGCCCC | 2751 |
| | | | | CGUCCGGUCC | | GCGTCCGGT | |
| | | | | CGAGC | | CCCGAGC | |
| PTPN11 | EXON | + | chr12: 112419006-112419031 | CGUCCGGUCC | 2000 | CGTCCGGTC | 2752 |
| | | | | CGAGCGGGCC | | CCGAGCGGG | |
| | | | | UCCCU | | CCTCCCT | |
| PTPN11 | EXON | + | chr12: 112419007-112419032 | GUCCGGUCCC | 2001 | GTCCGGTCC | 2753 |
| | | | | GAGCGGGCC | | CGAGCGGGC | |
| | | | | UCCCUC | | CTCCCTC | |
| PTPN11 | EXON | + | chr12: 112419034-112419059 | GCCAGCCCGA | 2002 | GCCAGCCCG | 2754 |
| | | | | UGUGACCGA | | ATGTGACCG | |
| | | | | GCCCAG | | AGCCCAG | |
| PTPN11 | EXON | + | chr12: 112419047-112419072 | GACCGAGCCC | 2003 | GACCGAGCC | 2755 |
| | | | | AGCGGAGCC | | CAGCGGAGC | |
| | | | | UGAGCA | | CTGAGCA | |
| PTPN11 | EXON | + | chr12: 112419052-112419077 | AGCCCAGCGG | 2004 | AGCCCAGCG | 2756 |
| | | | | AGCCUGAGC | | GAGCCTGAG | |
| | | | | AAGGAG | | CAAGGAG | |
| PTPN11 | EXON | + | chr12: 112419053-112419078 | GCCCAGCGGA | 2005 | GCCCAGCGG | 2757 |
| | | | | GCCUGAGCA | | AGCCTGAGC | |
| | | | | AGGAGC | | AAGGAGC | |
| PTPN11 | EXON | + | chr12: 112419063-112419088 | GCCUGAGCA | 2006 | GCCTGAGCA | 2758 |
| | | | | AGGAGCGGG | | AGGAGCGGG | |
| | | | | UCCGUCG | | TCCGTCG | |
| PTPN11 | EXON | + | chr12: 112419069-112419094 | GCAAGGAGC | 2007 | GCAAGGAGC | 2759 |
| | | | | GGGUCCGUC | | GGGTCCGTC | |
| | | | | GCGGAGC | | GCGGAGC | |
| PTPN11 | EXON | + | chr12: 112419072-112419097 | AGGAGCGGG | 2008 | AGGAGCGGG | 2760 |
| | | | | UCCGUCGCGG | | TCCGTCGCG | |
| | | | | AGCCGG | | GAGCCGG | |
| PTPN11 | EXON | + | chr12: 112419073-112419098 | GGAGCGGGU | 2009 | GGAGCGGGT | 2761 |
| | | | | CCGUCGCGGA | | CCGTCGCGG | |
| | | | | GCCGGA | | AGCCGGA | |
| PTPN11 | EXON | + | chr12: 112419076-112419101 | GCGGGUCCG | 2010 | GCGGGTCCG | 2762 |
| | | | | UCGCGGAGCC | | TCGCGGAGC | |
| | | | | GGAGGG | | CGGAGGG | |
| PTPN11 | EXON | + | chr12: 112419077-112419102 | CGGGUCCGUC | 2011 | CGGGTCCGT | 2763 |
| | | | | GCGGAGCCG | | CGCGGAGCC | |
| | | | | GAGGGC | | GGAGGGC | |
| PTPN11 | EXON | + | chr12: 112419080-112419105 | GUCCGUCGCG | 2012 | GTCCGTCGC | 2764 |
| | | | | GAGCCGGAG | | GGAGCCGGA | |
| | | | | GGCGGG | | GGGCGGG | |
| PTPN11 | EXON | + | chr12: 112419095-112419120 | GGAGGGCGG | 2013 | GGAGGGCGG | 2765 |
| | | | | GAGGAACAU | | GAGGAACAT | |
| | | | | GACAUCG | | GACATCG | |
| PTPN11 | EXON | + | chr12: 112419098-112419123 | GGGCGGGAG | 2014 | GGGCGGGAG | 2766 |
| | | | | GAACAUGAC | | GAACATGAC | |
| | | | | AUCGCGG | | ATCGCGG | |
| PTPN11 | EXON | + | chr12: 112419103-112419128 | GGAGGAACA | 2015 | GGAGGAACA | 2767 |
| | | | | UGACAUCGC | | TGACATCGC | |
| | | | | GGAGGUG | | GGAGGTG | |
| PTPN11 | EXON | + | chr12: 112419113-112419138 | GACAUCGCG | 2016 | GACATCGCG | 2768 |
| | | | | GAGGUGAGG | | GAGGTGAGG | |
| | | | | AGCCCCG | | AGCCCCG | |
| PTPN11 | EXON | + | chr12: 112419114-112419139 | ACAUCGCGG | 2017 | ACATCGCGG | 2769 |
| | | | | AGGUGAGGA | | AGGTGAGGA | |
| | | | | GCCCCGA | | GCCCCGA | |
| PTPN11 | EXON | + | chr12: 112419115-112419140 | CAUCGCGGA | 2018 | CATCGCGGA | 2770 |
| | | | | GGUGAGGAG | | GGTGAGGAG | |
| | | | | CCCCGAG | | CCCCGAG | |
| PTPN11 | EXON | − | chr12: 112418729-112418754 | CUUCCUCCUG | 2019 | CTTCCTCCTG | 2771 |
| | | | | GAAACCGCG | | GAAACCGCG | |
| | | | | GCCGCC | | GCCGCC | |
| PTPN11 | EXON | − | chr12: 112418737-112418762 | CAUCCUUGCU | 2020 | CATCCTTGCT | 2772 |
| | | | | UCCUCCUGGA | | TCCTCCTGG | |
| | | | | AACCG | | AAACCG | |
| PTPN11 | EXON | − | chr12: 112418746-112418771 | UGUCCAAAG | 2021 | TGTCCAAAG | 2773 |
| | | | | CAUCCUUGCU | | CATCCTTGCT | |
| | | | | UCCUCC | | TCCTCC | |
| PTPN11 | EXON | − | chr12: 112418786-112418811 | GAAUGGCAG | 2022 | GAATGGCAG | 2774 |
| | | | | CGCGGGGGC | | CGCGGGGGC | |
| | | | | UCCGCGG | | TCCGCGG | |
| PTPN11 | EXON | − | chr12: 112418789-112418814 | CGGGAAUGG | 2023 | CGGGAATGG | 2775 |
| | | | | CAGCGCGGG | | CAGCGCGGG | |
| | | | | GGCUCCG | | GGCTCCG | |
| PTPN11 | EXON | − | chr12: 112418797-112418822 | GCGACGGCCG | 2024 | GCGACGGCC | 2776 |
| | | | | GGAAUGGCA | | GGGAATGGC | |
| | | | | GCGCGG | | AGCGCGG | |
| PTPN11 | EXON | − | chr12: 112418798-112418823 | AGCGACGGCC | 2025 | AGCGACGGC | 2777 |
| | | | | GGGAAUGGC | | CGGGAATGG | |
| | | | | AGCGCG | | CAGCGCG | |
| PTPN11 | EXON | − | chr12: 112418799-112418824 | GAGCGACGG | 2026 | GAGCGACGG | 2778 |
| | | | | CCGGGAAUG | | CCGGGAATG | |
| | | | | GCAGCGC | | GCAGCGC | |
| PTPN11 | EXON | − | chr12: 112418800-112418825 | CGAGCGACG | 2027 | CGAGCGACG | 2779 |
| | | | | GCCGGGAAU | | GCCGGGAAT | |
| | | | | GGCAGCG | | GGCAGCG | |
| PTPN11 | EXON | − | chr12: 112418808-112418833 | CGGAGGACC | 2028 | CGGAGGACC | 2780 |
| | | | | GAGCGACGG | | GAGCGACGG | |
| | | | | CCGGGAA | | CCGGGAA | |
| PTPN11 | EXON | − | chr12: 112418813-112418838 | GUCAGCGGA | 2029 | GTCAGCGGA | 2781 |
| | | | | GGACCGAGC | | GGACCGAGC | |
| | | | | GACGGCC | | GACGGCC | |
| PTPN11 | EXON | − | chr12: 112418814-112418839 | CGUCAGCGG | 2030 | CGTCAGCGG | 2782 |
| | | | | AGGACCGAG | | AGGACCGAG | |
| | | | | CGACGGC | | CGACGGC | |
| PTPN11 | EXON | − | chr12: 112418818-112418843 | UUCCCGUCAG | 2031 | TTCCCGTCA | 2783 |
| | | | | CGGAGGACC | | GCGGAGGAC | |
| | | | | GAGCGA | | CGAGCGA | |
| PTPN11 | EXON | − | chr12: 112418830-112418855 | CGGACUUCCU | 2032 | CGGACTTCC | 2784 |
| | | | | GCUUCCCGUC | | TGCTTCCCGT | |
| | | | | AGCGG | | CAGCGG | |
| PTPN11 | EXON | − | chr12: 112418833-112418858 | CGGCGGACU | 2033 | CGGCGGACT | 2785 |
| | | | | UCCUGCUUCC | | TCCTGCTTCC | |
| | | | | CGUCAG | | CGTCAG | |
| PTPN11 | EXON | − | chr12: 112418927-112418952 | GAGACUGUG | 2034 | GAGACTGTG | 2786 |
| | | | | CAGCUGCGG | | CAGCTGCGG | |
| | | | | GGGCCGG | | GGGCCGG | |
| PTPN11 | EXON | − | chr12: 112418932-112418957 | UCCCGGAGAC | 2035 | TCCCGGAGA | 2787 |
| | | | | UGUGCAGCU | | CTGTGCAGC | |
| | | | | GCGGGG | | TGCGGGG | |
| PTPN11 | EXON | − | chr12: 112418954-112418979 | GACCCCCCUC | 2036 | GACCCCCCT | 2788 |
| | | | | CAGGCCUGG | | CCAGGCCTG | |
| | | | | GGAUCC | | GGGATCC | |
| PTPN11 | EXON | − | chr12: 112418961-112418986 | GCGCACAGAC | 2037 | GCGCACAGA | 2789 |
| | | | | CCCCCUCCAG | | CCCCCCTCC | |
| | | | | GCCUG | | AGGCCTG | |
| PTPN11 | EXON | − | chr12: 112418962-112418987 | CGCGCACAGA | 2038 | CGCGCACAG | 2790 |
| | | | | CCCCCCUCCA | | ACCCCCCTC | |
| | | | | GGCCU | | CAGGCCT | |
| PTPN11 | EXON | − | chr12: 112418963-112418988 | CCGCGCACAG | 2039 | CCGCGCACA | 2791 |
| | | | | ACCCCCCUCC | | GACCCCCCT | |
| | | | | AGGCC | | CCAGGCC | |
| PTPN11 | EXON | − | chr12: 112418968-112418993 | GCCGGCCGCG | 2040 | GCCGGCCGC | 2792 |
| | | | | CACAGACCCC | | GCACAGACC | |
| | | | | CCUCC | | CCCCTCC | |
| PTPN11 | EXON | − | chr12: 112418991-112419016 | GGACCGGAC | 2041 | GGACCGGAC | 2793 |
| | | | | GCGGGGCAG | | GCGGGGCAG | |
| | | | | AGCCAGC | | AGCCAGC | |
| PTPN11 | EXON | − | chr12: 112419004-112419029 | GGAGGCCCGC | 2042 | GGAGGCCCG | 2794 |
| | | | | UCGGGACCG | | CTCGGGACC | |
| | | | | GACGCG | | GGACGCG | |
| PTPN11 | EXON | − | chr12: 112419005-112419030 | GGGAGGCCC | 2043 | GGGAGGCCC | 2795 |
| | | | | GCUCGGGACC | | GCTCGGGAC | |
| | | | | GGACGC | | CGGACGC | |
| PTPN11 | EXON | − | chr12: 112419006-112419031 | AGGGAGGCC | 2044 | AGGGAGGCC | 2796 |
| | | | | CGCUCGGGAC | | CGCTCGGGA | |
| | | | | CGGACG | | CCGGACG | |
| PTPN11 | EXON | − | chr12: 112419012-112419037 | GGCCCGAGG | 2045 | GGCCCGAGG | 2797 |
| | | | | GAGGCCCGCU | | GAGGCCCGC | |
| | | | | CGGGAC | | TCGGGAC | |
| PTPN11 | EXON | − | chr12: 112419017-112419042 | GGGCUGGCCC | 2046 | GGGCTGGCC | 2798 |
| | | | | GAGGGAGGC | | CGAGGGAGG | |
| | | | | CCGCUC | | CCCGCTC | |
| PTPN11 | EXON | − | chr12: 112419018-112419043 | CGGGCUGGCC | 2047 | CGGGCTGGC | 2799 |
| | | | | CGAGGGAGG | | CCGAGGGAG | |
| | | | | CCCGCU | | GCCCGCT | |
| PTPN11 | EXON | − | chr12: 112419027-112419052 | CGGUCACAUC | 2048 | CGGTCACAT | 2800 |
| | | | | GGGCUGGCCC | | CGGGCTGGC | |
| | | | | GAGGG | | CCGAGGG | |
| PTPN11 | EXON | − | chr12: 112419030-112419055 | GCUCGGUCAC | 2049 | GCTCGGTCA | 2801 |
| | | | | AUCGGGCUG | | CATCGGGCT | |
| | | | | GCCCGA | | GGCCCGA | |
| PTPN11 | EXON | − | chr12: 112419031-112419056 | GGCUCGGUC | 2050 | GGCTCGGTC | 2802 |
| | | | | ACAUCGGGC | | ACATCGGGC | |
| | | | | UGGCCCG | | TGGCCCG | |
| PTPN11 | EXON | − | chr12: 112419038-112419063 | UCCGCUGGGC | 2051 | TCCGCTGGG | 2803 |
| | | | | UCGGUCACA | | CTCGGTCAC | |
| | | | | UCGGGC | | ATCGGGC | |
| PTPN11 | EXON | − | chr12: 112419042-112419067 | AGGCUCCGCU | 2052 | AGGCTCCGC | 2804 |
| | | | | GGGCUCGGU | | TGGGCTCGG | |
| | | | | CACAUC | | TCACATC | |
| PTPN11 | EXON | − | chr12: 112419043-112419068 | CAGGCUCCGC | 2053 | CAGGCTCCG | 2805 |
| | | | | UGGGCUCGG | | CTGGGCTCG | |
| | | | | UCACAU | | GTCACAT | |
| PTPN11 | EXON | − | chr12: 112419052-112419077 | CUCCUUGCUC | 2054 | CTCCTTGCTC | 2806 |
| | | | | AGGCUCCGCU | | AGGCTCCGC | |
| | | | | GGGCU | | TGGGCT | |
| PTPN11 | EXON | − | chr12: 112419057-112419082 | ACCCGCUCCU | 2055 | ACCCGCTCC | 2807 |
| | | | | UGCUCAGGC | | TTGCTCAGG | |
| | | | | UCCGCU | | CTCCGCT | |
| PTPN11 | EXON | − | chr12: 112419058-112419083 | GACCCGCUCC | 2056 | GACCCGCTC | 2808 |
| | | | | UUGCUCAGG | | CTTGCTCAG | |
| | | | | CUCCGC | | GCTCCGC | |
| PTPN11 | EXON | − | chr12: 112419067-112419092 | UCCGCGACGG | 2057 | TCCGCGACG | 2809 |
| | | | | ACCCGCUCCU | | GACCCGCTC | |
| | | | | UGCUC | | CTTGCTC | |
| PTPN11 | EXON | − | chr12: 112419085-112419110 | UUCCUCCCGC | 2058 | TTCCTCCCGC | 2810 |
| | | | | CCUCCGGCUC | | CCTCCGGCT | |
| | | | | CGCGA | | CCGCGA | |
| PTPN11 | EXON | − | chr12: 112419096-112419121 | GCGAUGUCA | 2059 | GCGATGTCA | 2811 |
| | | | | UGUUCCUCCC | | TGTTCCTCCC | |
| | | | | GCCCUC | | GCCCTC | |
| PTPN11 | EXON | + | chr12: 112446271-112446296 | UAAGAUGGU | 2060 | TAAGATGGT | 2812 |
| | | | | UUCACCCAAA | | TTCACCCAA | |
| | | | | UAUCAC | | ATATCAC | |
| PTPN11 | EXON | + | chr12: 112446276-112446301 | UGGUUUCAC | 2061 | TGGTTTCAC | 2813 |
| | | | | CCAAAUAUC | | CCAAATATC | |
| | | | | ACUGGUG | | ACTGGTG | |
| PTPN11 | EXON | + | chr12: 112446279-112446304 | UUUCACCCAA | 2062 | TTTCACCCA | 2814 |
| | | | | AUAUCACUG | | AATATCACT | |
| | | | | GUGUGG | | GGTGTGG | |
| PTPN11 | EXON | + | chr12: 112446304-112446329 | AGGCAGAAA | 2063 | AGGCAGAAA | 2815 |
| | | | | ACCUACUGU | | ACCTACTGT | |
| | | | | UGACAAG | | TGACAAG | |
| PTPN11 | EXON | + | chr12: 112446313-112446338 | ACCUACUGU | 2064 | ACCTACTGT | 2816 |
| | | | | UGACAAGAG | | TGACAAGAG | |
| | | | | GAGUUGA | | GAGTTGA | |
| PTPN11 | EXON | + | chr12: 112446324-112446349 | ACAAGAGGA | 2065 | ACAAGAGGA | 2817 |
| | | | | GUUGAUGGC | | GTTGATGGC | |
| | | | | AGUUUUU | | AGTTTTT | |
| PTPN11 | EXON | + | chr12: 112446329-112446354 | AGGAGUUGA | 2066 | AGGAGTTGA | 2818 |
| | | | | UGGCAGUUU | | TGGCAGTTT | |
| | | | | UUUGGCA | | TTTGGCA | |
| PTPN11 | EXON | + | chr12: 112446349-112446374 | UGGCAAGGC | 2067 | TGGCAAGGC | 2819 |
| | | | | CUAGUAAAA | | CTAGTAAAA | |
| | | | | GUAACCC | | GTAACCC | |
| PTPN11 | EXON | + | chr12: 112446371-112446396 | CCCUGGAGAC | 2068 | CCCTGGAGA | 2820 |
| | | | | UUCACACUU | | CTTCACACTT | |
| | | | | UCCGUU | | TCCGTT | |
| PTPN11 | EXON | + | chr12: 112446379-112446404 | ACUUCACACU | 2069 | ACTTCACAC | 2821 |
| | | | | UUCCGUUAG | | TTTCCGTTAG | |
| | | | | GUAAGU | | GTAAGT | |
| PTPN11 | EXON | − | chr12: 112446287-112446312 | UUCUGCCUCC | 2070 | TTCTGCCTCC | 2822 |
| | | | | ACACCAGUG | | ACACCAGTG | |
| | | | | AUAUUU | | ATATTT | |
| PTPN11 | EXON | − | chr12: 112446288-112446313 | UUUCUGCCUC | 2071 | TTTCTGCCTC | 2823 |
| | | | | CACACCAGUG | | CACACCAGT | |
| | | | | AUAUU | | GATATT | |
| PTPN11 | EXON | − | chr12: 112446317-112446342 | GCCAUCAACU | 2072 | GCCATCAAC | 2824 |
| | | | | CCUCUUGUCA | | TCCTCTTGTC | |
| | | | | ACAGU | | AACAGT | |
| PTPN11 | EXON | − | chr12: 112446360-112446385 | UGAAGUCUC | 2073 | TGAAGTCTC | 2825 |
| | | | | CAGGGUUAC | | CAGGGTTAC | |
| | | | | UUUUACU | | TTTTACT | |
| PTPN11 | EXON | − | chr12: 112446374-112446399 | CCUAACGGA | 2074 | CCTAACGGA | 2826 |
| | | | | AAGUGUGAA | | AAGTGTGAA | |
| | | | | GUCUCCA | | GTCTCCA | |
| PTPN11 | EXON | − | chr12: 112446375-112446400 | ACCUAACGG | 2075 | ACCTAACGG | 2827 |
| | | | | AAAGUGUGA | | AAAGTGTGA | |
| | | | | AGUCUCC | | AGTCTCC | |
| PTPN11 | EXON | + | chr12: 112450298-112450323 | UUCCAAUGG | 2076 | TTCCAATGG | 2828 |
| | | | | ACUAUUUUA | | ACTATTTTA | |
| | | | | GAAGAAA | | GAAGAAA | |
| PTPN11 | EXON | + | chr12: 112450331-112450356 | UCACCCACAU | 2077 | TCACCCACA | 2829 |
| | | | | CAAGAUUCA | | TCAAGATTC | |
| | | | | GAACAC | | AGAACAC | |
| PTPN11 | EXON | + | chr12: 112450352-112450377 | ACACUGGUG | 2078 | ACACTGGTG | 2830 |
| | | | | AUUACUAUG | | ATTACTATG | |
| | | | | ACCUGUA | | ACCTGTA | |
| PTPN11 | EXON | + | chr12: 112450355-112450380 | CUGGUGAUU | 2079 | CTGGTGATT | 2831 |
| | | | | ACUAUGACC | | ACTATGACC | |
| | | | | UGUAUGG | | TGTATGG | |
| PTPN11 | EXON | + | chr12: 112450356-112450381 | UGGUGAUUA | 2080 | TGGTGATTA | 2832 |
| | | | | CUAUGACCU | | CTATGACCT | |
| | | | | GUAUGGA | | GTATGGA | |
| PTPN11 | EXON | + | chr12: 112450357-112450382 | GGUGAUUAC | 2081 | GGTGATTAC | 2833 |
| | | | | UAUGACCUG | | TATGACCTG | |
| | | | | UAUGGAG | | TATGGAG | |
| PTPN11 | EXON | + | chr12: 112450375-112450400 | UAUGGAGGG | 2082 | TATGGAGGG | 2834 |
| | | | | GAGAAAUUU | | GAGAAATTT | |
| | | | | GCCACUU | | GCCACTT | |
| PTPN11 | EXON | + | chr12: 112450384-112450409 | GAGAAAUUU | 2083 | GAGAAATTT | 2835 |
| | | | | GCCACUUUG | | GCCACTTTG | |
| | | | | GCUGAGU | | GCTGAGT | |
| PTPN11 | EXON | + | chr12: 112450399-112450424 | UUGGCUGAG | 2084 | TTGGCTGAG | 2836 |
| | | | | UUGGUCCAG | | TTGGTCCAG | |
| | | | | UAUUACA | | TATTACA | |
| PTPN11 | EXON | + | chr12: 112450409-112450434 | UGGUCCAGU | 2085 | TGGTCCAGT | 2837 |
| | | | | AUUACAUGG | | ATTACATGG | |
| | | | | AACAUCA | | AACATCA | |
| PTPN11 | EXON | + | chr12: 112450410-112450435 | GGUCCAGUA | 2086 | GGTCCAGTA | 2838 |
| | | | | UUACAUGGA | | TTACATGGA | |
| | | | | ACAUCAC | | ACATCAC | |
| PTPN11 | EXON | + | chr12: 112450430-112450455 | AUCACGGGC | 2087 | ATCACGGGC | 2839 |
| | | | | AAUUAAAAG | | AATTAAAAG | |
| | | | | AGAAGAA | | AGAAGAA | |
| PTPN11 | EXON | + | chr12: 112450485-112450510 | GAACUGUGC | 2088 | GAACTGTGC | 2840 |
| | | | | AGAUCCUACC | | AGATCCTAC | |
| | | | | UCUGAA | | CTCTGAA | |
| PTPN11 | EXON | − | chr12: 112450303-112450328 | CUCCAUUUCU | 2089 | CTCCATTTCT | 2841 |
| | | | | UCUAAAAUA | | TCTAAAATA | |
| | | | | GUCCAU | | GTCCAT | |
| PTPN11 | EXON | − | chr12: 112450337-112450362 | UCACCAGUG | 2090 | TCACCAGTG | 2842 |
| | | | | UUCUGAAUC | | TTCTGAATCT | |
| | | | | UUGAUGU | | TGATGT | |
| PTPN11 | EXON | − | chr12: 112450338-112450363 | AUCACCAGU | 2091 | ATCACCAGT | 2843 |
| | | | | GUUCUGAAU | | GTTCTGAAT | |
| | | | | CUUGAUG | | CTTGATG | |
| PTPN11 | EXON | − | chr12: 112450374-112450399 | AGUGGCAAA | 2092 | AGTGGCAAA | 2844 |
| | | | | UUUCUCCCCU | | TTTCTCCCCT | |
| | | | | CCAUAC | | CCATAC | |
| PTPN11 | EXON | − | chr12: 112450397-112450422 | UAAUACUGG | 2093 | TAATACTGG | 2845 |
| | | | | ACCAACUCAG | | ACCAACTCA | |
| | | | | CCAAAG | | GCCAAAG | |
| PTPN11 | EXON | − | chr12: 112450416-112450441 | UUGCCCGUG | 2094 | TTGCCCGTG | 2846 |
| | | | | AUGUUCCAU | | ATGTTCCAT | |
| | | | | GUAAUAC | | GTAATAC | |
| PTPN11 | EXON | − | chr12: 112450483-112450508 | CAGAGGUAG | 2095 | CAGAGGTAG | 2847 |
| | | | | GAUCUGCAC | | GATCTGCAC | |
| | | | | AGUUCAG | | AGTTCAG | |
| PTPN11 | EXON | − | chr12: 112450501-112450526 | AAAAUGUUA | 2096 | AAAATGTTA | 2848 |
| | | | | CUGACCUUUC | | CTGACCTTTC | |
| | | | | AGAGGU | | AGAGGT | |
| PTPN11 | EXON | − | chr12: 112450505-112450530 | CACUAAAAU | 2097 | CACTAAAAT | 2849 |
| | | | | GUUACUGAC | | GTTACTGAC | |
| | | | | CUUUCAG | | CTTTCAG | |
| PTPN11 | EXON | + | chr12: 112453178-112453203 | UUUUUAAAA | 2098 | TTTTTAAAA | 2850 |
| | | | | ACUUUAGGU | | ACTTTAGGT | |
| | | | | GGUUUCA | | GGTTTCA | |
| PTPN11 | EXON | + | chr12: 112453190-112453215 | UUAGGUGGU | 2099 | TTAGGTGGT | 2851 |
| | | | | UUCAUGGAC | | TTCATGGAC | |
| | | | | AUCUCUC | | ATCTCTC | |
| PTPN11 | EXON | + | chr12: 112453191-112453216 | UAGGUGGUU | 2100 | TAGGTGGTT | 2852 |
| | | | | UCAUGGACA | | TCATGGACA | |
| | | | | UCUCUCU | | TCTCTCT | |
| PTPN11 | EXON | + | chr12: 112453223-112453248 | AAGCAGAGA | 2101 | AAGCAGAGA | 2853 |
| | | | | AAUUAUUAA | | AATTATTAA | |
| | | | | CUGAAAA | | CTGAAAA | |
| PTPN11 | EXON | + | chr12: 112453232-112453257 | AAUUAUUAA | 2102 | AATTATTAA | 2854 |
| | | | | CUGAAAAAG | | CTGAAAAAG | |
| | | | | GAAAACA | | GAAAACA | |
| PTPN11 | EXON | + | chr12: 112453268-112453293 | UUGUACGAG | 2103 | TTGTACGAG | 2855 |
| | | | | AGAGCCAGA | | AGAGCCAGA | |
| | | | | GCCACCC | | GCCACCC | |
| PTPN11 | EXON | + | chr12: 112453295-112453320 | GAGAUUUUG | 2104 | GAGATTTTG | 2856 |
| | | | | UUCUUUCUG | | TTCTTTCTGT | |
| | | | | UGCGCAC | | GCGCAC | |
| PTPN11 | EXON | + | chr12: 112453307-112453332 | UUUCUGUGC | 2105 | TTTCTGTGCG | 2857 |
| | | | | GCACUGGUG | | CACTGGTGA | |
| | | | | AUGACAA | | TGACAA | |
| PTPN11 | EXON | + | chr12: 112453308-112453333 | UUCUGUGCG | 2106 | TTCTGTGCG | 2858 |
| | | | | CACUGGUGA | | CACTGGTGA | |
| | | | | UGACAAA | | TGACAAA | |
| PTPN11 | EXON | + | chr12: 112453309-112453334 | UCUGUGCGC | 2107 | TCTGTGCGC | 2859 |
| | | | | ACUGGUGAU | | ACTGGTGAT | |
| | | | | GACAAAG | | GACAAAG | |
| PTPN11 | EXON | + | chr12: 112453322-112453347 | GUGAUGACA | 2108 | GTGATGACA | 2860 |
| | | | | AAGGGGAGA | | AAGGGGAGA | |
| | | | | GCAAUGA | | GCAATGA | |
| PTPN11 | EXON | + | chr12: 112453360-112453385 | GUGACCCAU | 2109 | GTGACCCAT | 2861 |
| | | | | GUUAUGAUU | | GTTATGATT | |
| | | | | CGCUGUC | | CGCTGTC | |
| PTPN11 | EXON | − | chr12: 112453284-112453309 | AAGAACAAA | 2110 | AAGAACAAA | 2862 |
| | | | | AUCUCCAGG | | ATCTCCAGG | |
| | | | | GUGGCUC | | GTGGCTC | |
| PTPN11 | EXON | − | chr12: 112453290-112453315 | CACAGAAAG | 2111 | CACAGAAAG | 2863 |
| | | | | AACAAAAUC | | AACAAAATC | |
| | | | | UCCAGGG | | TCCAGGG | |
| PTPN11 | EXON | − | chr12: 112453293-112453318 | GCGCACAGA | 2112 | GCGCACAGA | 2864 |
| | | | | AAGAACAAA | | AAGAACAAA | |
| | | | | AUCUCCA | | ATCTCCA | |
| PTPN11 | EXON | − | chr12: 112453294-112453319 | UGCGCACAG | 2113 | TGCGCACAG | 2865 |
| | | | | AAAGAACAA | | AAAGAACAA | |
| | | | | AAUCUCC | | AATCTCC | |
| PTPN11 | EXON | − | chr12: 112453367-112453392 | TTTACCTGA | 2114 | UUUACCUGA | 2866 |
| | | | | CAGCGAAUC | | CAGCGAATC | |
| | | | | AUAACAU | | ATAACAT | |
| PTPN11 | EXON | − | chr12: 112453368-112453393 | AUUUACCUG | 2115 | ATTTACCTG | 2867 |
| | | | | ACAGCGAAU | | ACAGCGAAT | |
| | | | | CAUAACA | | CATAACA | |
| PTPN11 | EXON | + | chr12: 112454555-112454580 | CUUGAAAGG | 2116 | CTTGAAAGG | 2868 |
| | | | | AACUGAAAU | | AACTGAAAT | |
| | | | | ACGACGU | | ACGACGT | |
| PTPN11 | EXON | + | chr12: 112454558-112454583 | GAAAGGAAC | 2117 | GAAAGGAAC | 2869 |
| | | | | UGAAAUACG | | TGAAATACG | |
| | | | | ACGUUGG | | ACGTTGG | |
| PTPN11 | EXON | + | chr12: 112454561-112454586 | AGGAACUGA | 2118 | AGGAACTGA | 2870 |
| | | | | AAUACGACG | | AATACGACG | |
| | | | | UUGGUGG | | TTGGTGG | |
| PTPN11 | EXON | + | chr12: 112454568-112454593 | GAAAUACGA | 2119 | GAAATACGA | 2871 |
| | | | | CGUUGGUGG | | CGTTGGTGG | |
| | | | | AGGAGAA | | AGGAGAA | |
| PTPN11 | EXON | + | chr12: 112454593-112454618 | CGGUUUGAU | 2120 | CGGTTTGAT | 2872 |
| | | | | UCUUUGACA | | TCTTTGACA | |
| | | | | GAUCUUG | | GATCTTG | |
| PTPN11 | EXON | + | chr12: 112454617-112454642 | GUGGAACAU | 2121 | GTGGAACAT | 2873 |
| | | | | UAUAAGAAG | | TATAAGAAG | |
| | | | | AAUCCUA | | AATCCTA | |
| PTPN11 | EXON | + | chr12: 112454620-112454645 | GAACAUUAU | 2122 | GAACATTAT | 2874 |
| | | | | AAGAAGAAU | | AAGAAGAAT | |
| | | | | CCUAUGG | | CCTATGG | |
| PTPN11 | EXON | + | chr12: 112454629-112454654 | AAGAAGAAU | 2123 | AAGAAGAAT | 2875 |
| | | | | CCUAUGGUG | | CCTATGGTG | |
| | | | | GAAACAU | | GAAACAT | |
| PTPN11 | EXON | + | chr12: 112454630-112454655 | AGAAGAAUC | 2124 | AGAAGAATC | 2876 |
| | | | | CUAUGGUGG | | CTATGGTGG | |
| | | | | AAACAUU | | AAACATT | |
| PTPN11 | EXON | + | chr12: 112454653-112454678 | UUGGGUACA | 2125 | TTGGGTACA | 2877 |
| | | | | GUACUACAA | | GTACTACAA | |
| | | | | CUCAAGC | | CTCAAGC | |
| PTPN11 | EXON | + | chr12: 112454665-112454690 | CUACAACUCA | 2126 | CTACAACTC | 2878 |
| | | | | AGCAGGUGA | | AAGCAGGTG | |
| | | | | GCAGAU | | AGCAGAT | |
| PTPN11 | EXON | − | chr12: 112454641-112454666 | GUACUGUAC | 2127 | GTACTGTAC | 2879 |
| | | | | CCAAUGUUU | | CCAATGTTT | |
| | | | | CCACCAU | | CCACCAT | |
| PTPN11 | EXON | + | chr12: 112456016-112456041 | CUGAGACCAC | 2128 | CTGAGACCA | 2880 |
| | | | | AGAUAAAGU | | CAGATAAAG | |
| | | | | CAAACA | | TCAAACA | |
| PTPN11 | EXON | + | chr12: 112456023-112456048 | CACAGAUAA | 2129 | CACAGATAA | 2881 |
| | | | | AGUCAAACA | | AGTCAAACA | |
| | | | | AGGCUUU | | AGGCTTT | |
| PTPN11 | EXON | + | chr12: 112456024-112456049 | ACAGAUAAA | 2130 | ACAGATAAA | 2882 |
| | | | | GUCAAACAA | | GTCAAACAA | |
| | | | | GGCUUUU | | GGCTTTT | |
| PTPN11 | EXON | + | chr12: 112456036-112456061 | AAACAAGGC | 2131 | AAACAAGGC | 2883 |
| | | | | UUUUGGGAA | | TTTTGGGAA | |
| | | | | GAAUUUG | | GAATTTG | |
| PTPN11 | EXON | − | chr12: 112455952-112455977 | CAGCAUUUA | 2132 | CAGCATTTA | 2884 |
| | | | | UACGAGUCG | | TACGAGTCG | |
| | | | | UGUUAAG | | TGTTAAG | |
| PTPN11 | EXON | − | chr12: 112455953-112455978 | GCAGCAUUU | 2133 | GCAGCATTT | 2885 |
| | | | | AUACGAGUC | | ATACGAGTC | |
| | | | | GUGUUAA | | GTGTTAA | |
| PTPN11 | EXON | − | chr12: 112455954-112455979 | AGCAGCAUU | 2134 | AGCAGCATT | 2886 |
| | | | | UAUACGAGU | | TATACGAGT | |
| | | | | CGUGUUA | | CGTGTTA | |
| PTPN11 | EXON | − | chr12: 112456025-112456050 | CAAAAGCCU | 2135 | CAAAAGCCT | 2887 |
| | | | | UGUUUGACU | | TGTTTGACTT | |
| | | | | UUAUCUG | | TATCTG | |
| PTPN11 | EXON | + | chr12: 112472931-112472956 | CUUUCUUUCC | 2136 | CTTTCTTTCC | 2888 |
| | | | | AGACACUAC | | AGACACTAC | |
| | | | | AACAAC | | AACAAC | |
| PTPN11 | EXON | + | chr12: 112472961-112472986 | UGCAAACUU | 2137 | TGCAAACTT | 2889 |
| | | | | CUCUACAGCC | | CTCTACAGC | |
| | | | | GAAAAG | | CGAAAAG | |
| PTPN11 | EXON | + | chr12: 112472962-112472987 | GCAAACUUC | 2138 | GCAAACTTC | 2890 |
| | | | | UCUACAGCCG | | TCTACAGCC | |
| | | | | AAAAGA | | GAAAAGA | |
| PTPN11 | EXON | + | chr12: 112472969-112472994 | UCUCUACAGC | 2139 | TCTCTACAG | 2891 |
| | | | | CGAAAAGAG | | CCGAAAAGA | |
| | | | | GGUCAA | | GGGTCAA | |
| PTPN11 | EXON | − | chr12: 112472942-112472967 | UUUGCACUCC | 2140 | TTTGCACTCC | 2892 |
| | | | | UGUUGUUGU | | TGTTGTTGTA | |
| | | | | AGUGUC | | GTGTC | |
| PTPN11 | EXON | − | chr12: 112472981-112473006 | GUUUUCUUG | 2141 | GTTTTCTTGC | 2893 |
| | | | | CCUUUGACCC | | CTTTGACCCT | |
| | | | | UCUUUU | | CTTTT | |
| PTPN11 | EXON | − | chr12: 112473035-112473060 | AGCGGAAUA | 2142 | AGCGGAATA | 2894 |
| | | | | UUGAUACUU | | TTGATACTT | |
| | | | | ACAGGGC | | ACAGGGC | |
| PTPN11 | EXON | + | chr12: 112477636-112477661 | UCUUUUUCU | 2143 | TCTTTTTCTT | 2895 |
| | | | | UCUAGUUGA | | CTAGTTGAT | |
| | | | | UCAUACC | | CATACC | |
| PTPN11 | EXON | + | chr12: 112477637-112477662 | CUUUUUCUU | 2144 | CTTTTTCTTC | 2896 |
| | | | | CUAGUUGAU | | TAGTTGATC | |
| | | | | CAUACCA | | ATACCA | |
| PTPN11 | EXON | + | chr12: 112477653-112477678 | AUCAUACCA | 2145 | ATCATACCA | 2897 |
| | | | | GGGUUGUCC | | GGGTTGTCC | |
| | | | | UACACGA | | TACACGA | |
| PTPN11 | EXON | + | chr12: 112477703-112477728 | GAUUACAUC | 2146 | GATTACATC | 2898 |
| | | | | AAUGCAAAU | | AATGCAAAT | |
| | | | | AUCAUCA | | ATCATCA | |
| PTPN11 | EXON | − | chr12: 112477662-112477687 | GGAUCACCA | 2147 | GGATCACCA | 2899 |
| | | | | UCGUGUAGG | | TCGTGTAGG | |
| | | | | ACAACCC | | ACAACCC | |
| PTPN11 | EXON | − | chr12: 112477672-112477697 | AGGCUCAUU | 2148 | AGGCTCATT | 2900 |
| | | | | GGGAUCACC | | GGGATCACC | |
| | | | | AUCGUGU | | ATCGTGT | |
| PTPN11 | EXON | − | chr12: 112477688-112477713 | UGAUGUAAU | 2149 | TGATGTAAT | 2901 |
| | | | | CUGAAACAG | | CTGAAACAG | |
| | | | | GCUCAUU | | GCTCATT | |
| PTPN11 | EXON | − | chr12: 112477689-112477714 | UUGAUGUAA | 2150 | TTGATGTAA | 2902 |
| | | | | UCUGAAACA | | TCTGAAACA | |
| | | | | GGCUCAU | | GGCTCAT | |
| PTPN11 | EXON | − | chr12: 112477697-112477722 | UAUUUGCAU | 2151 | TATTTGCATT | 2903 |
| | | | | UGAUGUAAU | | GATGTAATC | |
| | | | | CUGAAAC | | TGAAAC | |
| PTPN11 | EXON | + | chr12: 112477890-112477915 | CCAAAAAGA | 2152 | CCAAAAAGA | 2904 |
| | | | | GUUACAUUG | | GTTACATTG | |
| | | | | CCACACA | | CCACACA | |
| PTPN11 | EXON | + | chr12: 112477907-112477932 | GCCACACAAG | 2153 | GCCACACAA | 2905 |
| | | | | GCUGCCUGCA | | GGCTGCCTG | |
| | | | | AAACA | | CAAAACA | |
| PTPN11 | EXON | + | chr12: 112477921-112477946 | CCUGCAAAAC | 2154 | CCTGCAAAA | 2906 |
| | | | | ACGGUGAAU | | CACGGTGAA | |
| | | | | GACUUU | | TGACTTT | |
| PTPN11 | EXON | + | chr12: 112477924-112477949 | GCAAAACAC | 2155 | GCAAAACAC | 2907 |
| | | | | GGUGAAUGA | | GGTGAATGA | |
| | | | | CUUUUGG | | CTTTTGG | |
| PTPN11 | EXON | + | chr12: 112477928-112477953 | AACACGGUG | 2156 | AACACGGTG | 2908 |
| | | | | AAUGACUUU | | AATGACTTT | |
| | | | | UGGCGGA | | TGGCGGA | |
| PTPN11 | EXON | + | chr12: 112477976-112478001 | GUGAUUGUC | 2157 | GTGATTGTC | 2909 |
| | | | | AUGACAACG | | ATGACAACG | |
| | | | | AAAGAAG | | AAAGAAG | |
| PTPN11 | EXON | + | chr12: 112477983-112478008 | UCAUGACAA | 2158 | TCATGACAA | 2910 |
| | | | | CGAAAGAAG | | CGAAAGAAG | |
| | | | | UGGAGAG | | TGGAGAG | |
| PTPN11 | EXON | + | chr12: 112477988-112478013 | ACAACGAAA | 2159 | ACAACGAAA | 2911 |
| | | | | GAAGUGGAG | | GAAGTGGAG | |
| | | | | AGAGGAA | | AGAGGAA | |
| PTPN11 | EXON | − | chr12: 112477846-112477871 | GGUUUCAAA | 2160 | GGTTTCAAA | 2912 |
| | | | | UUCAGGCUA | | TTCAGGCTA | |
| | | | | GAAAUUU | | GAAATTT | |
| PTPN11 | EXON | − | chr12: 112477859-112477884 | AAUUGUUGC | 2161 | AATTGTTGC | 2913 |
| | | | | ACUUGGUUU | | ACTTGGTTTC | |
| | | | | CAAAUUC | | AAATTC | |
| PTPN11 | EXON | − | chr12: 112477872-112477897 | TTTTTGGGCT | 2162 | UUUUUGGGC | 2914 |
| | | | | UUUGAAUUG | | TTGAATTGTT | |
| | | | | UUGCACU | | GCACT | |
| PTPN11 | EXON | − | chr12: 112477892-112477917 | CUUGUGUGG | 2163 | CTTGTGTGG | 2915 |
| | | | | CAAUGUAAC | | CAATGTAAC | |
| | | | | UCUUUUU | | TCTTTTT | |
| PTPN11 | EXON | − | chr12: 112477893-112477918 | CCUUGUGUG | 2164 | CCTTGTGTG | 2916 |
| | | | | GCAAUGUAA | | GCAATGTAA | |
| | | | | CUCUUUU | | CTCTTTT | |
| PTPN11 | EXON | − | chr12: 112477911-112477936 | ACCGUGUUU | 2165 | ACCGTGTTTT | 2917 |
| | | | | UGCAGGCAG | | GCAGGCAGC | |
| | | | | CCUUGUG | | CTTGTG | |
| PTPN11 | EXON | − | chr12: 112477924-112477949 | CCAAAAGUC | 2166 | CCAAAAGTC | 2918 |
| | | | | AUUCACCGU | | ATTCACCGT | |
| | | | | GUUUUGC | | GTTTTGC | |
| PTPN11 | EXON | − | chr12: 112477963-112477988 | CAUGACAAU | 2167 | CATGACAAT | 2919 |
| | | | | CACUCGGGA | | CACTCGGGA | |
| | | | | GUUUUCU | | GTTTTCT | |
| PTPN11 | EXON | − | chr12: 112477974-112477999 | UCUUUCGUU | 2168 | TCTTTCGTTG | 2920 |
| | | | | GUCAUGACA | | TCATGACAA | |
| | | | | AUCACUC | | TCACTC | |
| PTPN11 | EXON | − | chr12: 112477975-112478000 | UUCUUUCGU | 2169 | TTCTTTCGTT | 2921 |
| | | | | UGUCAUGAC | | GTCATGACA | |
| | | | | AAUCACU | | ATCACT | |
| PTPN11 | EXON | + | chr12: 112482066-112482091 | CUUCCAGAG | 2170 | CTTCCAGAG | 2922 |
| | | | | UAAAUGUGU | | TAAATGTGT | |
| | | | | CAAAUAC | | CAAATAC | |
| PTPN11 | EXON | + | chr12: 112482095-112482120 | CUGAUGAGU | 2171 | CTGATGAGT | 2923 |
| | | | | AUGCUCUAA | | ATGCTCTAA | |
| | | | | AAGAAUA | | AAGAATA | |
| PTPN11 | EXON | + | chr12: 112482111-112482136 | AAAAGAAUA | 2172 | AAAAGAATA | 2924 |
| | | | | UGGCGUCAU | | TGGCGTCAT | |
| | | | | GCGUGUU | | GCGTGTT | |
| PTPN11 | EXON | + | chr12: 112482169-112482194 | ACGCUAAGA | 2173 | ACGCTAAGA | 2925 |
| | | | | GAACUUAAA | | GAACTTAAA | |
| | | | | CUUUCAA | | CTTTCAA | |
| PTPN11 | EXON | + | chr12: 112482173-112482198 | UAAGAGAAC | 2174 | TAAGAGAAC | 2926 |
| | | | | UUAAACUUU | | TTAAACTTTC | |
| | | | | CAAAGGU | | AAAGGT | |
| PTPN11 | EXON | − | chr12: 112482072-112482097 | AGGCCAGUA | 2175 | AGGCCAGTA | 2927 |
| | | | | UUUGACACA | | TTTGACACA | |
| | | | | UUUACUC | | TTTACTC | |
| PTPN11 | EXON | − | chr12: 112482097-112482122 | CAUAUUCUU | 2176 | CATATTCTTT | 2928 |
| | | | | UUAGAGCAU | | TAGAGCATA | |
| | | | | ACUCAUC | | CTCATC | |
| PTPN11 | EXON | − | chr12: 112482158-112482183 | AGUUCUCUU | 2177 | AGTTCTCTTA | 2929 |
| | | | | AGCGUAUAG | | GCGTATAGT | |
| | | | | UCAUGAG | | CATGAG | |
| PTPN11 | EXON | + | chr12: 112486456-112486481 | UUCUUGGCU | 2178 | TTCTTGGCTC | 2930 |
| | | | | CUACUCCAGG | | TACTCCAGG | |
| | | | | GGAAUA | | GGAATA | |
| PTPN11 | EXON | + | chr12: 112486465-112486490 | CUACUCCAGG | 2179 | CTACTCCAG | 2931 |
| | | | | GGAAUACGG | | GGGAATACG | |
| | | | | AGAGAA | | GAGAGAA | |
| PTPN11 | EXON | + | chr12: 112486470-112486495 | CCAGGGGAA | 2180 | CCAGGGGAA | 2932 |
| | | | | UACGGAGAG | | TACGGAGAG | |
| | | | | AACGGUC | | AACGGTC | |
| PTPN11 | EXON | + | chr12: 112486485-112486510 | GAGAACGGU | 2181 | GAGAACGGT | 2933 |
| | | | | CUGGCAAUA | | CTGGCAATA | |
| | | | | CCACUUU | | CCACTTT | |
| PTPN11 | EXON | + | chr12: 112486491-112486516 | GGUCUGGCA | 2182 | GGTCTGGCA | 2934 |
| | | | | AUACCACUU | | ATACCACTT | |
| | | | | UCGGACC | | TCGGACC | |
| PTPN11 | EXON | + | chr12: 112486495-112486520 | UGGCAAUAC | 2183 | TGGCAATAC | 2935 |
| | | | | CACUUUCGG | | CACTTTCGG | |
| | | | | ACCUGGC | | ACCTGGC | |
| PTPN11 | EXON | + | chr12: 112486502-112486527 | ACCACUUUCG | 2184 | ACCACTTTC | 2936 |
| | | | | GACCUGGCCG | | GGACCTGGC | |
| | | | | GACCA | | CGGACCA | |
| PTPN11 | EXON | + | chr12: 112486520-112486545 | CGGACCACGG | 2185 | CGGACCACG | 2937 |
| | | | | CGUGCCCAGC | | GCGTGCCCA | |
| | | | | GACCC | | GCGACCC | |
| PTPN11 | EXON | + | chr12: 112486521-112486546 | GGACCACGGC | 2186 | GGACCACGG | 2938 |
| | | | | GUGCCCAGCG | | CGTGCCCAG | |
| | | | | ACCCU | | CGACCCT | |
| PTPN11 | EXON | + | chr12: 112486522-112486547 | GACCACGGCG | 2187 | GACCACGGC | 2939 |
| | | | | UGCCCAGCGA | | GTGCCCAGC | |
| | | | | CCCUG | | GACCCTG | |
| PTPN11 | EXON | + | chr12: 112486523-112486548 | ACCACGGCGU | 2188 | ACCACGGCG | 2940 |
| | | | | GCCCAGCGAC | | TGCCCAGCG | |
| | | | | CCUGG | | ACCCTGG | |
| PTPN11 | EXON | + | chr12: 112486531-112486556 | GUGCCCAGCG | 2189 | GTGCCCAGC | 2941 |
| | | | | ACCCUGGGG | | GACCCTGGG | |
| | | | | GCGUGC | | GGCGTGC | |
| PTPN11 | EXON | + | chr12: 112486540-112486565 | GACCCUGGG | 2190 | GACCCTGGG | 2942 |
| | | | | GGCGUGCUG | | GGCGTGCTG | |
| | | | | GACUUCC | | GACTTCC | |
| PTPN11 | EXON | + | chr12: 112486543-112486568 | CCUGGGGGC | 2191 | CCTGGGGGC | 2943 |
| | | | | GUGCUGGAC | | GTGCTGGAC | |
| | | | | UUCCUGG | | TTCCTGG | |
| PTPN11 | EXON | + | chr12: 112486546-112486571 | GGGGGCGUG | 2192 | GGGGGCGTG | 2944 |
| | | | | CUGGACUUCC | | CTGGACTTC | |
| | | | | UGGAGG | | CTGGAGG | |
| PTPN11 | EXON | + | chr12: 112486561-112486586 | UUCCUGGAG | 2193 | TTCCTGGAG | 2945 |
| | | | | GAGGUGCAC | | GAGGTGCAC | |
| | | | | CAUAAGC | | CATAAGC | |
| PTPN11 | EXON | + | chr12: 112486573-112486598 | GUGCACCAU | 2194 | GTGCACCAT | 2946 |
| | | | | AAGCAGGAG | | AAGCAGGAG | |
| | | | | AGCAUCA | | AGCATCA | |
| PTPN11 | EXON | + | chr12: 112486580-112486605 | AUAAGCAGG | 2195 | ATAAGCAGG | 2947 |
| | | | | AGAGCAUCA | | AGAGCATCA | |
| | | | | UGGAUGC | | TGGATGC | |
| PTPN11 | EXON | + | chr12: 112486581-112486606 | UAAGCAGGA | 2196 | TAAGCAGGA | 2948 |
| | | | | GAGCAUCAU | | GAGCATCAT | |
| | | | | GGAUGCA | | GGATGCA | |
| PTPN11 | EXON | + | chr12: 112486585-112486610 | CAGGAGAGC | 2197 | CAGGAGAGC | 2949 |
| | | | | AUCAUGGAU | | ATCATGGAT | |
| | | | | GCAGGGC | | GCAGGGC | |
| PTPN11 | EXON | + | chr12: 112486591-112486616 | AGCAUCAUG | 2198 | AGCATCATG | 2950 |
| | | | | GAUGCAGGG | | GATGCAGGG | |
| | | | | CCGGUCG | | CCGGTCG | |
| PTPN11 | EXON | + | chr12: 112486602-112486627 | UGCAGGGCC | 2199 | TGCAGGGCC | 2951 |
| | | | | GGUCGUGGU | | GGTCGTGGT | |
| | | | | GCACUGC | | GCACTGC | |
| PTPN11 | EXON | + | chr12: 112486627-112486652 | AGGUGACAG | 2200 | AGGTGACAG | 2952 |
| | | | | CUCCUGCUGC | | CTCCTGCTG | |
| | | | | CCCUCU | | CCCCTCT | |
| PTPN11 | EXON | + | chr12: 112486659-112486684 | AGCCUGUCCC | 2201 | AGCCTGTCC | 2953 |
| | | | | UGUCUCCUA | | CTGTCTCCTA | |
| | | | | GCGCCC | | GCGCCC | |
| PTPN11 | EXON | + | chr12: 112486660-112486685 | GCCUGUCCCU | 2202 | GCCTGTCCC | 2954 |
| | | | | GUCUCCUAGC | | TGTCTCCTA | |
| | | | | GCCCA | | GCGCCCA | |
| PTPN11 | EXON | + | chr12: 112486700-112486725 | UACCCACUCC | 2203 | TACCCACTC | 2955 |
| | | | | UAGCUCUUU | | CTAGCTCTTT | |
| | | | | AACUGU | | AACTGT | |
| PTPN11 | EXON | + | chr12: 112486723-112486748 | GUAGGAAGA | 2204 | GTAGGAAGA | 2956 |
| | | | | AUUUAAUAU | | ATTTAATAT | |
| | | | | CUGUUUG | | CTGTTTG | |
| PTPN11 | EXON | + | chr12: 112486744-112486769 | UUUGAGGCA | 2205 | TTTGAGGCA | 2957 |
| | | | | UAGAGCAAC | | TAGAGCAAC | |
| | | | | UGCAUUG | | TGCATTG | |
| PTPN11 | EXON | + | chr12: 112486745-112486770 | UUGAGGCAU | 2206 | TTGAGGCAT | 2958 |
| | | | | AGAGCAACU | | AGAGCAACT | |
| | | | | GCAUUGA | | GCATTGA | |
| PTPN11 | EXON | + | chr12: 112486762-112486787 | UGCAUUGAG | 2207 | TGCATTGAG | 2959 |
| | | | | GGACAUUUU | | GGACATTTT | |
| | | | | GAUCCCA | | GATCCCA | |
| PTPN11 | EXON | + | chr12: 112486797-112486822 | CUCCUAGACC | 2208 | CTCCTAGAC | 2960 |
| | | | | CUACAGCACU | | CCTACAGCA | |
| | | | | GCCAU | | CTGCCAT | |
| PTPN11 | EXON | + | chr12: 112486803-112486828 | GACCCUACAG | 2209 | GACCCTACA | 2961 |
| | | | | CACUGCCAUU | | GCACTGCCA | |
| | | | | GGCCA | | TTGGCCA | |
| PTPN11 | EXON | + | chr12: 112486809-112486834 | ACAGCACUGC | 2210 | ACAGCACTG | 2962 |
| | | | | CAUUGGCCA | | CCATTGGCC | |
| | | | | UGGCCA | | ATGGCCA | |
| PTPN11 | EXON | + | chr12: 112486895-112486920 | AGUUGUGCA | 2211 | AGTTGTGCA | 2963 |
| | | | | UUAAACAAC | | TTAAACAAC | |
| | | | | UUCAUCC | | TTCATCC | |
| PTPN11 | EXON | − | chr12: 112486473-112486498 | CCAGACCGUU | 2212 | CCAGACCGT | 2964 |
| | | | | CUCUCCGUAU | | TCTCTCCGTA | |
| | | | | UCCCC | | TTCCCC | |
| PTPN11 | EXON | − | chr12: 112486506-112486531 | GCCGUGGUCC | 2213 | GCCGTGGTC | 2965 |
| | | | | GGCCAGGUCC | | CGGCCAGGT | |
| | | | | GAAAG | | CCGAAAG | |
| PTPN11 | EXON | − | chr12: 112486517-112486542 | UCGCUGGGC | 2214 | TCGCTGGGC | 2966 |
| | | | | ACGCCGUGG | | ACGCCGTGG | |
| | | | | UCCGGCC | | TCCGGCC | |
| PTPN11 | EXON | − | chr12: 112486522-112486547 | CAGGGUCGC | 2215 | CAGGGTCGC | 2967 |
| | | | | UGGGCACGCC | | TGGGCACGC | |
| | | | | GUGGUC | | CGTGGTC | |
| PTPN11 | EXON | − | chr12: 112486527-112486552 | GCCCCCAGGG | 2216 | GCCCCCAGG | 2968 |
| | | | | UCGCUGGGC | | GTCGCTGGG | |
| | | | | ACGCCG | | CACGCCG | |
| PTPN11 | EXON | − | chr12: 112486537-112486562 | AGUCCAGCAC | 2217 | AGTCCAGCA | 2969 |
| | | | | GCCCCCAGGG | | CGCCCCCAG | |
| | | | | UCGCU | | GGTCGCT | |
| PTPN11 | EXON | − | chr12: 112486538-112486563 | AAGUCCAGC | 2218 | AAGTCCAGC | 2970 |
| | | | | ACGCCCCCAG | | ACGCCCCCA | |
| | | | | GGUCGC | | GGGTCGC | |
| PTPN11 | EXON | − | chr12: 112486545-112486570 | CUCCAGGAA | 2219 | CTCCAGGAA | 2971 |
| | | | | GUCCAGCACG | | GTCCAGCAC | |
| | | | | CCCCCA | | GCCCCCA | |
| PTPN11 | EXON | − | chr12: 112486546-112486571 | CCUCCAGGAA | 2220 | CCTCCAGGA | 2972 |
| | | | | GUCCAGCACG | | AGTCCAGCA | |
| | | | | CCCCC | | CGCCCCC | |
| PTPN11 | EXON | − | chr12: 112486566-112486591 | CUCCUGCUUA | 2221 | CTCCTGCTTA | 2973 |
| | | | | UGGUGCACC | | TGGTGCACC | |
| | | | | UCCUCC | | TCCTCC | |
| PTPN11 | EXON | − | chr12: 112486581-112486606 | UGCAUCCAU | 2222 | TGCATCCAT | 2974 |
| | | | | GAUGCUCUCC | | GATGCTCTC | |
| | | | | UGCUUA | | CTGCTTA | |
| PTPN11 | EXON | − | chr12: 112486612-112486637 | GCUGUCACCU | 2223 | GCTGTCACC | 2975 |
| | | | | GCAGUGCACC | | TGCAGTGCA | |
| | | | | ACGAC | | CCACGAC | |
| PTPN11 | EXON | − | chr12: 112486641-112486666 | ACAGGCUGU | 2224 | ACAGGCTGT | 2976 |
| | | | | GGCCUAGAG | | GGCCTAGAG | |
| | | | | GGGCAGC | | GGGCAGC | |
| PTPN11 | EXON | − | chr12: 112486648-112486673 | GACAGGGAC | 2225 | GACAGGGAC | 2977 |
| | | | | AGGCUGUGG | | AGGCTGTGG | |
| | | | | CCUAGAG | | CCTAGAG | |
| PTPN11 | EXON | − | chr12: 112486649-112486674 | AGACAGGGA | 2226 | AGACAGGGA | 2978 |
| | | | | CAGGCUGUG | | CAGGCTGTG | |
| | | | | GCCUAGA | | GCCTAGA | |
| PTPN11 | EXON | − | chr12: 112486650-112486675 | GAGACAGGG | 2227 | GAGACAGGG | 2979 |
| | | | | ACAGGCUGU | | ACAGGCTGT | |
| | | | | GGCCUAG | | GGCCTAG | |
| PTPN11 | EXON | − | chr12: 112486658-112486683 | GGCGCUAGG | 2228 | GGCGCTAGG | 2980 |
| | | | | AGACAGGGA | | AGACAGGGA | |
| | | | | CAGGCUG | | CAGGCTG | |
| PTPN11 | EXON | − | chr12: 112486664-112486689 | GCCCUGGGCG | 2229 | GCCCTGGGC | 2981 |
| | | | | CUAGGAGAC | | GCTAGGAGA | |
| | | | | AGGGAC | | CAGGGAC | |
| PTPN11 | EXON | − | chr12: 112486669-112486694 | AGCAAGCCCU | 2230 | AGCAAGCCC | 2982 |
| | | | | GGGCGCUAG | | TGGGCGCTA | |
| | | | | GAGACA | | GGAGACA | |
| PTPN11 | EXON | − | chr12: 112486670-112486695 | AAGCAAGCCC | 2231 | AAGCAAGCC | 2983 |
| | | | | UGGGCGCUA | | CTGGGCGCT | |
| | | | | GGAGAC | | AGGAGAC | |
| PTPN11 | EXON | − | chr12: 112486677-112486702 | UAGGUAAAA | 2232 | TAGGTAAAA | 2984 |
| | | | | GCAAGCCCUG | | GCAAGCCCT | |
| | | | | GGCGCU | | GGGCGCT | |
| PTPN11 | EXON | − | chr12: 112486684-112486709 | GAGUGGGUA | 2233 | GAGTGGGTA | 2985 |
| | | | | GGUAAAAGC | | GGTAAAAGC | |
| | | | | AAGCCCU | | AAGCCCT | |
| PTPN11 | EXON | − | chr12: 112486685-112486710 | GGAGUGGGU | 2234 | GGAGTGGGT | 2986 |
| | | | | AGGUAAAAG | | AGGTAAAAG | |
| | | | | CAAGCCC | | CAAGCCC | |
| PTPN11 | EXON | − | chr12: 112486701-112486726 | UACAGUUAA | 2235 | TACAGTTAA | 2987 |
| | | | | AGAGCUAGG | | AGAGCTAGG | |
| | | | | AGUGGGU | | AGTGGGT | |
| PTPN11 | EXON | − | chr12: 112486705-112486730 | UUCCUACAG | 2236 | TTCCTACAG | 2988 |
| | | | | UUAAAGAGC | | TTAAAGAGC | |
| | | | | UAGGAGU | | TAGGAGT | |
| PTPN11 | EXON | − | chr12: 112486706-112486731 | CUUCCUACAG | 2237 | CTTCCTACA | 2989 |
| | | | | UUAAAGAGC | | GTTAAAGAG | |
| | | | | UAGGAG | | CTAGGAG | |
| PTPN11 | EXON | − | chr12: 112486711-112486736 | AAAUUCUUC | 2238 | AAATTCTTC | 2990 |
| | | | | CUACAGUUA | | CTACAGTTA | |
| | | | | AAGAGCU | | AAGAGCT | |
| PTPN11 | EXON | − | chr12: 112486786-112486811 | GUAGGGUCU | 2239 | GTAGGGTCT | 2991 |
| | | | | AGGAGAAAU | | AGGAGAAAT | |
| | | | | AUGCCUU | | ATGCCTT | |
| PTPN11 | EXON | − | chr12: 112486787-112486812 | UGUAGGGUC | 2240 | TGTAGGGTC | 2992 |
| | | | | UAGGAGAAA | | TAGGAGAAA | |
| | | | | UAUGCCU | | TATGCCT | |
| PTPN11 | EXON | − | chr12: 112486802-112486827 | GGCCAAUGG | 2241 | GGCCAATGG | 2993 |
| | | | | CAGUGCUGU | | CAGTGCTGT | |
| | | | | AGGGUCU | | AGGGTCT | |
| PTPN11 | EXON | − | chr12: 112486808-112486833 | GGCCAUGGCC | 2242 | GGCCATGGC | 2994 |
| | | | | AAUGGCAGU | | CAATGGCAG | |
| | | | | GCUGUA | | TGCTGTA | |
| PTPN11 | EXON | − | chr12: 112486809-112486834 | UGGCCAUGG | 2243 | TGGCCATGG | 2995 |
| | | | | CCAAUGGCA | | CCAATGGCA | |
| | | | | GUGCUGU | | GTGCTGT | |
| PTPN11 | EXON | − | chr12: 112486821-112486846 | AGCAUGUUG | 2244 | AGCATGTTG | 2996 |
| | | | | CCAUGGCCAU | | CCATGGCCA | |
| | | | | GGCCAA | | TGGCCAA | |
| PTPN11 | EXON | − | chr12: 112486828-112486853 | UUAACUGAG | 2245 | TTAACTGAG | 2997 |
| | | | | CAUGUUGCC | | CATGTTGCC | |
| | | | | AUGGCCA | | ATGGCCA | |
| PTPN11 | EXON | − | chr12: 112486834-112486859 | GCUGUUUUA | 2246 | GCTGTTTTA | 2998 |
| | | | | ACUGAGCAU | | ACTGAGCAT | |
| | | | | GUUGCCA | | GTTGCCA | |
| PTPN11 | EXON | − | chr12: 112486890-112486915 | AAGUUGUUU | 2247 | AAGTTGTTT | 2999 |
| | | | | AAUGCACAA | | AATGCACAA | |
| | | | | CUUCUGG | | CTTCTGG | |
| PTPN11 | EXON | − | chr12: 112486893-112486918 | AUGAAGUUG | 2248 | ATGAAGTTG | 3000 |
| | | | | UUUAAUGCA | | TTTAATGCA | |
| | | | | CAACUUC | | CAACTTC | |
| PTPN11 | EXON | + | chr12: 112488426-112488451 | GUCCUUCUGC | 2249 | GTCCTTCTGC | 3001 |
| | | | | CCGCAGUGCU | | CCGCAGTGC | |
| | | | | GGAAU | | TGGAAT | |
| PTPN11 | EXON | + | chr12: 112488430-112488455 | UUCUGCCCGC | 2250 | TTCTGCCCG | 3002 |
| | | | | AGUGCUGGA | | CAGTGCTGG | |
| | | | | AUUGGC | | AATTGGC | |
| PTPN11 | EXON | + | chr12: 112488435-112488460 | CCCGCAGUGC | 2251 | CCCGCAGTG | 3003 |
| | | | | UGGAAUUGG | | CTGGAATTG | |
| | | | | CCGGAC | | GCCGGAC | |
| PTPN11 | EXON | + | chr12: 112488436-112488461 | CCGCAGUGCU | 2252 | CCGCAGTGC | 3004 |
| | | | | GGAAUUGGC | | TGGAATTGG | |
| | | | | CGGACA | | CCGGACA | |
| PTPN11 | EXON | + | chr12: 112488483-112488508 | UUCUUAUUG | 2253 | TTCTTATTGA | 3005 |
| | | | | ACAUCAUCA | | CATCATCAG | |
| | | | | GAGAGAA | | AGAGAA | |
| PTPN11 | EXON | + | chr12: 112488486-112488511 | UUAUUGACA | 2254 | TTATTGACA | 3006 |
| | | | | UCAUCAGAG | | TCATCAGAG | |
| | | | | AGAAAGG | | AGAAAGG | |
| PTPN11 | EXON | + | chr12: 112488487-112488512 | UAUUGACAU | 2255 | TATTGACAT | 3007 |
| | | | | CAUCAGAGA | | CATCAGAGA | |
| | | | | GAAAGGU | | GAAAGGT | |
| PTPN11 | EXON | + | chr12: 112488495-112488520 | UCAUCAGAG | 2256 | TCATCAGAG | 3008 |
| | | | | AGAAAGGUG | | AGAAAGGTG | |
| | | | | GGUCAUC | | GGTCATC | |
| PTPN11 | EXON | + | chr12: 112488498-112488523 | UCAGAGAGA | 2257 | TCAGAGAGA | 3009 |
| | | | | AAGGUGGGU | | AAGGTGGGT | |
| | | | | CAUCUGG | | CATCTGG | |
| PTPN11 | EXON | + | chr12: 112488499-112488524 | CAGAGAGAA | 2258 | CAGAGAGAA | 3010 |
| | | | | AGGUGGGUC | | AGGTGGGTC | |
| | | | | AUCUGGU | | ATCTGGT | |
| PTPN11 | EXON | − | chr12: 112488431-112488456 | GGCCAAUUCC | 2259 | GGCCAATTC | 3011 |
| | | | | AGCACUGCG | | CAGCACTGC | |
| | | | | GGCAGA | | GGGCAGA | |
| PTPN11 | EXON | − | chr12: 112488438-112488463 | CCUGUCCGGC | 2260 | CCTGTCCGG | 3012 |
| | | | | CAAUUCCAGC | | CCAATTCCA | |
| | | | | ACUGC | | GCACTGC | |
| PTPN11 | EXON | − | chr12: 112488439-112488464 | CCCUGUCCGG | 2261 | CCCTGTCCG | 3013 |
| | | | | CCAAUUCCAG | | GCCAATTCC | |
| | | | | CACUG | | AGCACTG | |
| PTPN11 | EXON | − | chr12: 112488457-112488482 | AUCAAUCAC | 2262 | ATCAATCAC | 3014 |
| | | | | AAUGAACGU | | AATGAACGT | |
| | | | | CCCUGUC | | CCCTGTC | |
| PTPN11 | EXON | + | chr12: 112489037-112489062 | AUUGACGUU | 2263 | ATTGACGTT | 3015 |
| | | | | CCCAAAACCA | | CCCAAAACC | |
| | | | | UCCAGA | | ATCCAGA | |
| PTPN11 | EXON | + | chr12: 112489042-112489067 | CGUUCCCAAA | 2264 | CGTTCCCAA | 3016 |
| | | | | ACCAUCCAGA | | AACCATCCA | |
| | | | | UGGUG | | GATGGTG | |
| PTPN11 | EXON | + | chr12: 112489051-112489076 | AACCAUCCAG | 2265 | AACCATCCA | 3017 |
| | | | | AUGGUGCGG | | GATGGTGCG | |
| | | | | UCUCAG | | GTCTCAG | |
| PTPN11 | EXON | + | chr12: 112489056-112489081 | UCCAGAUGG | 2266 | TCCAGATGG | 3018 |
| | | | | UGCGGUCUC | | TGCGGTCTC | |
| | | | | AGAGGUC | | AGAGGTC | |
| PTPN11 | EXON | + | chr12: 112489057-112489082 | CCAGAUGGU | 2267 | CCAGATGGT | 3019 |
| | | | | GCGGUCUCA | | GCGGTCTCA | |
| | | | | GAGGUCA | | GAGGTCA | |
| PTPN11 | EXON | + | chr12: 112489061-112489086 | AUGGUGCGG | 2268 | ATGGTGCGG | 3020 |
| | | | | UCUCAGAGG | | TCTCAGAGG | |
| | | | | UCAGGGA | | TCAGGGA | |
| PTPN11 | EXON | + | chr12: 112489097-112489122 | GAAGCACAG | 2269 | GAAGCACAG | 3021 |
| | | | | UACCGAUUU | | TACCGATTT | |
| | | | | AUCUAUA | | ATCTATA | |
| PTPN11 | EXON | + | chr12: 112489100-112489125 | GCACAGUACC | 2270 | GCACAGTAC | 3022 |
| | | | | GAUUUAUCU | | CGATTTATCT | |
| | | | | AUAUGG | | ATATGG | |
| PTPN11 | EXON | + | chr12: 112489132-112489157 | GCAUUAUAU | 2271 | GCATTATAT | 3023 |
| | | | | UGAAACACU | | TGAAACACT | |
| | | | | ACAGCGC | | ACAGCGC | |
| PTPN11 | EXON | + | chr12: 112489148-112489173 | CUACAGCGCA | 2272 | CTACAGCGC | 3024 |
| | | | | GGAUUGAAG | | AGGATTGAA | |
| | | | | AAGAGC | | GAAGAGC | |
| PTPN11 | EXON | + | chr12: 112489161-112489186 | UUGAAGAAG | 2273 | TTGAAGAAG | 3025 |
| | | | | AGCAGGUAC | | AGCAGGTAC | |
| | | | | CAGCCUG | | CAGCCTG | |
| PTPN11 | EXON | + | chr12: 112489162-112489187 | UGAAGAAGA | 2274 | TGAAGAAGA | 3026 |
| | | | | GCAGGUACC | | GCAGGTACC | |
| | | | | AGCCUGA | | AGCCTGA | |
| PTPN11 | EXON | + | chr12: 112489166-112489191 | GAAGAGCAG | 2275 | GAAGAGCAG | 3027 |
| | | | | GUACCAGCCU | | GTACCAGCC | |
| | | | | GAGGGC | | TGAGGGC | |
| PTPN11 | EXON | − | chr12: 112489017-112489042 | UCAAUAUCG | 2276 | TCAATATCG | 3028 |
| | | | | CAGUCAACAC | | CAGTCAACA | |
| | | | | CUACGA | | CCTACGA | |
| PTPN11 | EXON | − | chr12: 112489049-112489074 | GAGACCGCAC | 2277 | GAGACCGCA | 3029 |
| | | | | CAUCUGGAU | | CCATCTGGA | |
| | | | | GGUUUU | | TGGTTTT | |
| PTPN11 | EXON | − | chr12: 112489050-112489075 | UGAGACCGC | 2278 | TGAGACCGC | 3030 |
| | | | | ACCAUCUGG | | ACCATCTGG | |
| | | | | AUGGUUU | | ATGGTTT | |
| PTPN11 | EXON | − | chr12: 112489056-112489081 | GACCUCUGA | 2279 | GACCTCTGA | 3031 |
| | | | | GACCGCACCA | | GACCGCACC | |
| | | | | UCUGGA | | ATCTGGA | |
| PTPN11 | EXON | − | chr12: 112489060-112489085 | CCCUGACCUC | 2280 | CCCTGACCT | 3032 |
| | | | | UGAGACCGC | | CTGAGACCG | |
| | | | | ACCAUC | | CACCATC | |
| PTPN11 | EXON | − | chr12: 112489093-112489118 | GAUAAAUCG | 2281 | GATAAATCG | 3033 |
| | | | | GUACUGUGC | | GTACTGTGC | |
| | | | | UUCUGUC | | TTCTGTC | |
| PTPN11 | EXON | − | chr12: 112489111-112489136 | AUGCUGGAC | 2282 | ATGCTGGAC | 3034 |
| | | | | CGCCAUAUA | | CGCCATATA | |
| | | | | GAUAAAU | | GATAAAT | |
| PTPN11 | EXON | − | chr12: 112489132-112489157 | GCGCUGUAG | 2283 | GCGCTGTAG | 3035 |
| | | | | UGUUUCAAU | | TGTTTCAAT | |
| | | | | AUAAUGC | | ATAATGC | |
| PTPN11 | EXON | + | chr12: 112502127-112502152 | CUCUUCCAAA | 2284 | CTCTTCCAA | 3036 |
| | | | | UUUCAGAAA | | ATTTCAGAA | |
| | | | | AGCAAG | | AAGCAAG | |
| PTPN11 | EXON | + | chr12: 112502132-112502157 | CCAAAUUUC | 2285 | CCAAATTTC | 3037 |
| | | | | AGAAAAGCA | | AGAAAAGCA | |
| | | | | AGAGGAA | | AGAGGAA | |
| PTPN11 | EXON | + | chr12: 112502133-112502158 | CAAAUUUCA | 2286 | CAAATTTCA | 3038 |
| | | | | GAAAAGCAA | | GAAAAGCAA | |
| | | | | GAGGAAA | | GAGGAAA | |
| PTPN11 | EXON | + | chr12: 112502167-112502192 | UAUACAAAU | 2287 | TATACAAAT | 3039 |
| | | | | AUUAAGUAU | | ATTAAGTAT | |
| | | | | UCUCUAG | | TCTCTAG | |
| PTPN11 | EXON | + | chr12: 112502180-112502205 | AGUAUUCUC | 2288 | AGTATTCTCT | 3040 |
| | | | | UAGCGGACC | | AGCGGACCA | |
| | | | | AGACGAG | | GACGAG | |
| PTPN11 | EXON | + | chr12: 112502245-112502270 | CCCUGUGCAG | 2289 | CCCTGTGCA | 3041 |
| | | | | AGUAAGUAG | | GAGTAAGTA | |
| | | | | UGCUGA | | GTGCTGA | |
| PTPN11 | EXON | − | chr12: 112502135-112502160 | CCUUUCCUCU | 2290 | CCTTTCCTCT | 3042 |
| | | | | UGCUUUUCU | | TGCTTTTCTG | |
| | | | | GAAAUU | | AAATT | |
| PTPN11 | EXON | − | chr12: 112502199-112502224 | GAGAGGGCU | 2291 | GAGAGGGCT | 3043 |
| | | | | CUGAUCUCCA | | CTGATCTCC | |
| | | | | CUCGUC | | ACTCGTC | |
| PTPN11 | EXON | − | chr12: 112502220-112502245 | UGGCGUUGG | 2292 | TGGCGTTGG | 3044 |
| | | | | AGUACAAGG | | AGTACAAGG | |
| | | | | CGGGAGA | | CGGGAGA | |
| PTPN11 | EXON | − | chr12: 112502221-112502246 | GUGGCGUUG | 2293 | GTGGCGTTG | 3045 |
| | | | | GAGUACAAG | | GAGTACAAG | |
| | | | | GCGGGAG | | GCGGGAG | |
| PTPN11 | EXON | − | chr12: 112502226-112502251 | ACAGGGUGG | 2294 | ACAGGGTGG | 3046 |
| | | | | CGUUGGAGU | | CGTTGGAGT | |
| | | | | ACAAGGC | | ACAAGGC | |
| PTPN11 | EXON | − | chr12: 112502227-112502252 | CACAGGGUG | 2295 | CACAGGGTG | 3047 |
| | | | | GCGUUGGAG | | GCGTTGGAG | |
| | | | | UACAAGG | | TACAAGG | |
| PTPN11 | EXON | − | chr12: 112502230-112502255 | CUGCACAGG | 2296 | CTGCACAGG | 3048 |
| | | | | GUGGCGUUG | | GTGGCGTTG | |
| | | | | GAGUACA | | GAGTACA | |
| PTPN11 | EXON | − | chr12: 112502239-112502264 | CUACUUACUC | 2297 | CTACTTACTC | 3049 |
| | | | | UGCACAGGG | | TGCACAGGG | |
| | | | | UGGCGU | | TGGCGT | |
| PTPN11 | EXON | − | chr12: 112502245-112502270 | UCAGCACUAC | 2298 | TCAGCACTA | 3050 |
| | | | | UUACUCUGC | | CTTACTCTGC | |
| | | | | ACAGGG | | ACAGGG | |
| PTPN11 | EXON | − | chr12: 112502248-112502273 | CCUUCAGCAC | 2299 | CCTTCAGCA | 3051 |
| | | | | UACUUACUC | | CTACTTACTC | |
| | | | | UGCACA | | TGCACA | |
| PTPN11 | EXON | − | chr12: 112502249-112502274 | UCCUUCAGCA | 2300 | TCCTTCAGC | 3052 |
| | | | | CUACUUACUC | | ACTACTTAC | |
| | | | | UGCAC | | TCTGCAC | |
| PTPN11 | EXON | + | chr12: 112504704-112504729 | GACAGUGCU | 2301 | GACAGTGCT | 3053 |
| | | | | AGAGUCUAU | | AGAGTCTAT | |
| | | | | GAAAACG | | GAAAACG | |
| PTPN11 | EXON | + | chr12: 112504705-112504730 | ACAGUGCUA | 2302 | ACAGTGCTA | 3054 |
| | | | | GAGUCUAUG | | GAGTCTATG | |
| | | | | AAAACGU | | AAAACGT | |
| PTPN11 | EXON | + | chr12: 112504769-112504794 | CCUGCCAAAA | 2303 | CCTGCCAAA | 3055 |
| | | | | CUUCAGCACA | | ACTTCAGCA | |
| | | | | GAAAU | | CAGAAAT | |
| PTPN11 | EXON | − | chr12: 112504693-112504718 | ACUCUAGCAC | 2304 | ACTCTAGCA | 3056 |
| | | | | UGUCUUCUC | | CTGTCTTCTC | |
| | | | | UCAUUC | | TCATTC | |
| PTPN11 | EXON | − | chr12: 112504736-112504761 | UCUGAAACU | 2305 | TCTGAAACT | 3057 |
| | | | | UUUCUGCUG | | TTTCTGCTGT | |
| | | | | UUGCAUC | | TGCATC | |
| PTPN11 | EXON | − | chr12: 112504772-112504797 | CCUAUUUCU | 2306 | CCTATTTCTG | 3058 |
| | | | | GUGCUGAAG | | TGCTGAAGT | |
| | | | | UUUUGGC | | TTTGGC | |
| PTPN11 | EXON | − | chr12: 112504776-112504801 | AAUACCUAU | 2307 | AATACCTAT | 3059 |
| | | | | UUCUGUGCU | | TTCTGTGCTG | |
| | | | | GAAGUUU | | AAGTTT | |
| PTPN11 | EXON | + | chr12: 112505869-112505894 | AGAAAGUUU | 2308 | AGAAAGTTT | 3060 |
| | | | | AUGUGAAGA | | ATGTGAAGA | |
| | | | | CAGAAUU | | CAGAATT | |
| PTPN11 | EXON | + | chr12: 112505875-112505900 | UUUAUGUGA | 2309 | TTTATGTGA | 3061 |
| | | | | AGACAGAAU | | AGACAGAAT | |
| | | | | UUGGAUU | | TTGGATT | |
| PTPN11 | EXON | + | chr12: 112505879-112505904 | UGUGAAGAC | 2310 | TGTGAAGAC | 3062 |
| | | | | AGAAUUUGG | | AGAATTTGG | |
| | | | | AUUUGGA | | ATTTGGA | |
| PTPN11 | EXON | + | chr12: 112505891-112505916 | AUUUGGAUU | 2311 | ATTTGGATTT | 3063 |
| | | | | UGGAAGGCU | | GGAAGGCTT | |
| | | | | UGCAAUG | | GCAATG | |
| PTPN11 | EXON | + | chr12: 112506051-112506076 | AUUUUAUAG | 2312 | ATTTTATAG | 3064 |
| | | | | AAUUUGUUU | | AATTTGTTTG | |
| | | | | GAAAUUG | | AAATTG | |
| PTPN11 | EXON | + | chr12: 112506089-112506114 | AUUGUGCGC | 2313 | ATTGTGCGC | 3065 |
| | | | | UGUAUUUUG | | TGTATTTTGC | |
| | | | | CAGAUUA | | AGATTA | |
| PTPN11 | EXON | + | chr12: 112506090-112506115 | UUGUGCGCU | 2314 | TTGTGCGCT | 3066 |
| | | | | GUAUUUUGC | | GTATTTTGC | |
| | | | | AGAUUAU | | AGATTAT | |
| PTPN11 | EXON | + | chr12: 112506091-112506116 | UGUGCGCUG | 2315 | TGTGCGCTG | 3067 |
| | | | | UAUUUUGCA | | TATTTTGCA | |
| | | | | GAUUAUG | | GATTATG | |
| PTPN11 | EXON | + | chr12: 112506111-112506136 | UUAUGGGGA | 2316 | TTATGGGGA | 3068 |
| | | | | UUCAAAUUC | | TTCAAATTCT | |
| | | | | UAGUAAU | | AGTAAT | |
| PTPN11 | EXON | + | chr12: 112506171-112506196 | GUUUAAUUU | 2317 | GTTTAATTTT | 3069 |
| | | | | UUUUUUUCC | | TTTTTTCCTC | |
| | | | | UCAUUGU | | ATTGT | |
| PTPN11 | EXON | + | chr12: 112506172-112506197 | UUUAAUUUU | 2318 | TTTAATTTTT | 3070 |
| | | | | UUUUUUCCU | | TTTTTCCTCA | |
| | | | | CAUUGUU | | TTGTT | |
| PTPN11 | EXON | + | chr12: 112506173-112506198 | UUAAUUUUU | 2319 | TTAATTTTTT | 3071 |
| | | | | UUUUUCCUC | | TTTTCCTCAT | |
| | | | | AUUGUUG | | TGTTG | |
| PTPN11 | EXON | + | chr12: 112506195-112506220 | UUGGGGAUG | 2320 | TTGGGGATG | 3072 |
| | | | | AUGAGAAGA | | ATGAGAAGA | |
| | | | | AAUGAUU | | AATGATT | |
| PTPN11 | EXON | + | chr12: 112506196-112506221 | UGGGGAUGA | 2321 | TGGGGATGA | 3073 |
| | | | | UGAGAAGAA | | TGAGAAGAA | |
| | | | | AUGAUUU | | ATGATTT | |
| PTPN11 | EXON | + | chr12: 112506263-112506288 | UCAUUUACC | 2322 | TCATTTACC | 3074 |
| | | | | AUCAUGUAU | | ATCATGTAT | |
| | | | | CCAGUAG | | CCAGTAG | |
| PTPN11 | EXON | + | chr12: 112506280-112506305 | UCCAGUAGU | 2323 | TCCAGTAGT | 3075 |
| | | | | GGAUAAUUC | | GGATAATTC | |
| | | | | AUUUUGA | | ATTTTGA | |
| PTPN11 | EXON | + | chr12: 112506293-112506318 | AAUUCAUUU | 2324 | AATTCATTTT | 3076 |
| | | | | UGAUGGCUU | | GATGGCTTC | |
| | | | | CUAUUUU | | TATTTT | |
| PTPN11 | EXON | + | chr12: 112506348-112506373 | GACUGUCAG | 2325 | GACTGTCAG | 3077 |
| | | | | AAGUUGACC | | AAGTTGACC | |
| | | | | UUUGCAC | | TTTGCAC | |
| PTPN11 | EXON | + | chr12: 112506378-112506403 | UUAAAGAGU | 2326 | TTAAAGAGT | 3078 |
| | | | | CAUAGAAAA | | CATAGAAAA | |
| | | | | AGAAUCA | | AGAATCA | |
| PTPN11 | EXON | + | chr12: 112506395-112506420 | AAGAAUCAU | 2327 | AAGAATCAT | 3079 |
| | | | | GGAUAUUUA | | GGATATTTA | |
| | | | | UGAAUUA | | TGAATTA | |
| PTPN11 | EXON | + | chr12: 112506402-112506427 | AUGGAUAUU | 2328 | ATGGATATT | 3080 |
| | | | | UAUGAAUUA | | TATGAATTA | |
| | | | | AGGUAAG | | AGGTAAG | |
| PTPN11 | EXON | + | chr12: 112506407-112506432 | UAUUUAUGA | 2329 | TATTTATGA | 3081 |
| | | | | AUUAAGGUA | | ATTAAGGTA | |
| | | | | AGAGGUG | | AGAGGTG | |
| PTPN11 | EXON | + | chr12: 112506453-112506478 | UUCCAGCCGU | 2330 | TTCCAGCCG | 3082 |
| | | | | UGACCAAUU | | TTGACCAAT | |
| | | | | AUAGUU | | TATAGTT | |
| PTPN11 | EXON | + | chr12: 112506475-112506500 | GUUCGGCUG | 2331 | GTTCGGCTG | 3083 |
| | | | | UUGACUGAG | | TTGACTGAG | |
| | | | | AAGUUUG | | AAGTTTG | |
| PTPN11 | EXON | + | chr12: 112506478-112506503 | CGGCUGUUG | 2332 | CGGCTGTTG | 3084 |
| | | | | ACUGAGAAG | | ACTGAGAAG | |
| | | | | UUUGUGG | | TTTGTGG | |
| PTPN11 | EXON | + | chr12: 112506479-112506504 | GGCUGUUGA | 2333 | GGCTGTTGA | 3085 |
| | | | | CUGAGAAGU | | CTGAGAAGT | |
| | | | | UUGUGGU | | TTGTGGT | |
| PTPN11 | EXON | + | chr12: 112506537-112506562 | AAUAAUUGU | 2334 | AATAATTGT | 3086 |
| | | | | CUUGUACUU | | CTTGTACTTA | |
| | | | | AGAAAAA | | GAAAAA | |
| PTPN11 | EXON | + | chr12: 112506563-112506588 | GGCGUCUAU | 2335 | GGCGTCTAT | 3087 |
| | | | | GAAUGACCA | | GAATGACCA | |
| | | | | GUGUUUU | | GTGTTTT | |
| PTPN11 | EXON | + | chr12: 112506605-112506630 | UGACAAACU | 2336 | TGACAAACT | 3088 |
| | | | | UAUCCCAAA | | TATCCCAAA | |
| | | | | ACUUUAG | | ACTTTAG | |
| PTPN11 | EXON | + | chr12: 112506647-112506672 | CCCCCAACUG | 2337 | CCCCCAACT | 3089 |
| | | | | UUAGUCAAU | | GTTAGTCAA | |
| | | | | CUGAGC | | TCTGAGC | |
| PTPN11 | EXON | + | chr12: 112506648-112506673 | CCCCAACUGU | 2338 | CCCCAACTG | 3090 |
| | | | | UAGUCAAUC | | TTAGTCAAT | |
| | | | | UGAGCU | | CTGAGCT | |
| PTPN11 | EXON | + | chr12: 112506657-112506682 | UUAGUCAAU | 2339 | TTAGTCAAT | 3091 |
| | | | | CUGAGCUGG | | CTGAGCTGG | |
| | | | | GCUCAGC | | GCTCAGC | |
| PTPN11 | EXON | + | chr12: 112506658-112506683 | UAGUCAAUC | 2340 | TAGTCAATC | 3092 |
| | | | | UGAGCUGGG | | TGAGCTGGG | |
| | | | | CUCAGCU | | CTCAGCT | |
| PTPN11 | EXON | + | chr12: 112506681-112506706 | CUGGGCUGU | 2341 | CTGGGCTGT | 3093 |
| | | | | UCUUCUGCCA | | TCTTCTGCCA | |
| | | | | GCCUGC | | GCCTGC | |
| PTPN11 | EXON | + | chr12: 112506684-112506709 | GGCUGUUCU | 2342 | GGCTGTTCTT | 3094 |
| | | | | UCUGCCAGCC | | CTGCCAGCC | |
| | | | | UGCAGG | | TGCAGG | |
| PTPN11 | EXON | + | chr12: 112506696-112506721 | GCCAGCCUGC | 2343 | GCCAGCCTG | 3095 |
| | | | | AGGUGGCCA | | CAGGTGGCC | |
| | | | | CUCAUG | | ACTCATG | |
| PTPN11 | EXON | + | chr12: 112506704-112506729 | GCAGGUGGC | 2344 | GCAGGTGGC | 3096 |
| | | | | CACUCAUGU | | CACTCATGT | |
| | | | | GGUCAGC | | GGTCAGC | |
| PTPN11 | EXON | + | chr12: 112506708-112506733 | GUGGCCACUC | 2345 | GTGGCCACT | 3097 |
| | | | | AUGUGGUCA | | CATGTGGTC | |
| | | | | GCAGGU | | AGCAGGT | |
| PTPN11 | EXON | + | chr12: 112506711-112506736 | GCCACUCAUG | 2346 | GCCACTCAT | 3098 |
| | | | | UGGUCAGCA | | GTGGTCAGC | |
| | | | | GGUCGG | | AGGTCGG | |
| PTPN11 | EXON | + | chr12: 112506720-112506745 | GUGGUCAGC | 2347 | GTGGTCAGC | 3099 |
| | | | | AGGUCGGCG | | AGGTCGGCG | |
| | | | | GAGAGAC | | GAGAGAC | |
| PTPN11 | EXON | + | chr12: 112506721-112506746 | UGGUCAGCA | 2348 | TGGTCAGCA | 3100 |
| | | | | GGUCGGCGG | | GGTCGGCGG | |
| | | | | AGAGACU | | AGAGACT | |
| PTPN11 | EXON | + | chr12: 112506725-112506750 | CAGCAGGUC | 2349 | CAGCAGGTC | 3101 |
| | | | | GGCGGAGAG | | GGCGGAGAG | |
| | | | | ACUGGGA | | ACTGGGA | |
| PTPN11 | EXON | + | chr12: 112506729-112506754 | AGGUCGGCG | 2350 | AGGTCGGCG | 3102 |
| | | | | GAGAGACUG | | GAGAGACTG | |
| | | | | GGAUGGC | | GGATGGC | |
| PTPN11 | EXON | + | chr12: 112506730-112506755 | GGUCGGCGG | 2351 | GGTCGGCGG | 3103 |
| | | | | AGAGACUGG | | AGAGACTGG | |
| | | | | GAUGGCU | | GATGGCT | |
| PTPN11 | EXON | + | chr12: 112506788-112506813 | UCCUUCUUCG | 2352 | TCCTTCTTCG | 3104 |
| | | | | UGUAGUCUC | | TGTAGTCTCT | |
| | | | | UUUCAG | | TTCAG | |
| PTPN11 | EXON | + | chr12: 112506793-112506818 | CUUCGUGUA | 2353 | CTTCGTGTA | 3105 |
| | | | | GUCUCUUUC | | GTCTCTTTCA | |
| | | | | AGUGGCC | | GTGGCC | |
| PTPN11 | EXON | + | chr12: 112506797-112506822 | GUGUAGUCU | 2354 | GTGTAGTCT | 3106 |
| | | | | CUUUCAGUG | | CTTTCAGTG | |
| | | | | GCCUGGC | | GCCTGGC | |
| PTPN11 | EXON | + | chr12: 112506801-112506826 | AGUCUCUUU | 2355 | AGTCTCTTTC | 3107 |
| | | | | CAGUGGCCU | | AGTGGCCTG | |
| | | | | GGCUGGC | | GCTGGC | |
| PTPN11 | EXON | + | chr12: 112506802-112506827 | GUCUCUUUC | 2356 | GTCTCTTTCA | 3108 |
| | | | | AGUGGCCUG | | GTGGCCTGG | |
| | | | | GCUGGCA | | CTGGCA | |
| PTPN11 | EXON | + | chr12: 112506858-112506883 | GCUCCCAAGA | 2357 | GCTCCCAAG | 3109 |
| | | | | GCUCAAAAG | | AGCTCAAAA | |
| | | | | CAGAAA | | GCAGAAA | |
| PTPN11 | EXON | + | chr12: 112506863-112506888 | CAAGAGCUC | 2358 | CAAGAGCTC | 3110 |
| | | | | AAAAGCAGA | | AAAAGCAGA | |
| | | | | AAUGGCC | | AATGGCC | |
| PTPN11 | EXON | + | chr12: 112506966-112506991 | AUGAUGAUG | 2359 | ATGATGATG | 3111 |
| | | | | AUGAUGAUG | | ATGATGATG | |
| | | | | AUGAUGA | | ATGATGA | |
| PTPN11 | EXON | + | chr12: 112506991-112507016 | UGGUUUUUU | 2360 | TGGTTTTTTC | 3112 |
| | | | | CUAAUCAGA | | TAATCAGAA | |
| | | | | AGAAAGC | | GAAAGC | |
| PTPN11 | EXON | + | chr12: 112506992-112507017 | GGUUUUUUC | 2361 | GGTTTTTTCT | 3113 |
| | | | | UAAUCAGAA | | AATCAGAAG | |
| | | | | GAAAGCU | | AAAGCT | |
| PTPN11 | EXON | + | chr12: 112506993-112507018 | GUUUUUUCU | 2362 | GTTTTTTCTA | 3114 |
| | | | | AAUCAGAAG | | ATCAGAAGA | |
| | | | | AAAGCUG | | AAGCTG | |
| PTPN11 | EXON | + | chr12: 112507047-112507072 | ACAAGCCCAG | 2363 | ACAAGCCCA | 3115 |
| | | | | CUCAGAUUC | | GCTCAGATT | |
| | | | | AAGAAA | | CAAGAAA | |
| PTPN11 | EXON | + | chr12: 112507048-112507073 | CAAGCCCAGC | 2364 | CAAGCCCAG | 3116 |
| | | | | UCAGAUUCA | | CTCAGATTC | |
| | | | | AGAAAA | | AAGAAAA | |
| PTPN11 | EXON | + | chr12: 112507061-112507086 | GAUUCAAGA | 2365 | GATTCAAGA | 3117 |
| | | | | AAAGGGUGU | | AAAGGGTGT | |
| | | | | GAAGUAG | | GAAGTAG | |
| PTPN11 | EXON | + | chr12: 112507074-112507099 | GGUGUGAAG | 2366 | GGTGTGAAG | 3118 |
| | | | | UAGAGGUGC | | TAGAGGTGC | |
| | | | | AGUUAAG | | AGTTAAG | |
| PTPN11 | EXON | + | chr12: 112507075-112507100 | GUGUGAAGU | 2367 | GTGTGAAGT | 3119 |
| | | | | AGAGGUGCA | | AGAGGTGCA | |
| | | | | GUUAAGU | | GTTAAGT | |
| PTPN11 | EXON | + | chr12: 112507076-112507101 | UGUGAAGUA | 2368 | TGTGAAGTA | 3120 |
| | | | | GAGGUGCAG | | GAGGTGCAG | |
| | | | | UUAAGUG | | TTAAGTG | |
| PTPN11 | EXON | + | chr12: 112507077-112507102 | GUGAAGUAG | 2369 | GTGAAGTAG | 3121 |
| | | | | AGGUGCAGU | | AGGTGCAGT | |
| | | | | UAAGUGG | | TAAGTGG | |
| PTPN11 | EXON | + | chr12: 112507078-112507103 | UGAAGUAGA | 2370 | TGAAGTAGA | 3122 |
| | | | | GGUGCAGUU | | GGTGCAGTT | |
| | | | | AAGUGGG | | AAGTGGG | |
| PTPN11 | EXON | + | chr12: 112507097-112507122 | AGUGGGGGG | 2371 | AGTGGGGGG | 3123 |
| | | | | CCACUAGUCU | | CCACTAGTC | |
| | | | | AACAGA | | TAACAGA | |
| PTPN11 | EXON | + | chr12: 112507115-112507140 | UAACAGACG | 2372 | TAACAGACG | 3124 |
| | | | | GUCACAACCA | | GTCACAACC | |
| | | | | GUGCCA | | AGTGCCA | |
| PTPN11 | EXON | + | chr12: 112507125-112507150 | UCACAACCAG | 2373 | TCACAACCA | 3125 |
| | | | | UGCCAUGGA | | GTGCCATGG | |
| | | | | AAACCA | | AAAACCA | |
| PTPN11 | EXON | + | chr12: 112507160-112507185 | CAAAAGCAG | 2374 | CAAAAGCAG | 3126 |
| | | | | AAGUUGCUA | | AAGTTGCTA | |
| | | | | GUGACCU | | GTGACCT | |
| PTPN11 | EXON | + | chr12: 112507161-112507186 | AAAAGCAGA | 2375 | AAAAGCAGA | 3127 |
| | | | | AGUUGCUAG | | AGTTGCTAG | |
| | | | | UGACCUU | | TGACCTT | |
| PTPN11 | EXON | + | chr12: 112507187-112507212 | GGAAGCCGA | 2376 | GGAAGCCGA | 3128 |
| | | | | AGCUGCUUA | | AGCTGCTTA | |
| | | | | CAGUAGC | | CAGTAGC | |
| PTPN11 | EXON | + | chr12: 112507188-112507213 | GAAGCCGAA | 2377 | GAAGCCGAA | 3129 |
| | | | | GCUGCUUAC | | GCTGCTTAC | |
| | | | | AGUAGCU | | AGTAGCT | |
| PTPN11 | EXON | + | chr12: 112507223-112507248 | GAAAGUCAG | 2378 | GAAAGTCAG | 3130 |
| | | | | ACUAAGAAA | | ACTAAGAAA | |
| | | | | UAAAGAG | | TAAAGAG | |
| PTPN11 | EXON | + | chr12: 112507224-112507249 | AAAGUCAGA | 2379 | AAAGTCAGA | 3131 |
| | | | | CUAAGAAAU | | CTAAGAAAT | |
| | | | | AAAGAGA | | AAAGAGA | |
| PTPN11 | EXON | + | chr12: 112507275-112507300 | UUUCUGCUA | 2380 | TTTCTGCTAG | 3132 |
| | | | | GCCCUGAGCC | | CCCTGAGCC | |
| | | | | UAUUUU | | TATTTT | |
| PTPN11 | EXON | + | chr12: 112507288-112507313 | UGAGCCUAU | 2381 | TGAGCCTAT | 3133 |
| | | | | UUUUGGAAC | | TTTTGGAAC | |
| | | | | CAGCACU | | CAGCACT | |
| PTPN11 | EXON | + | chr12: 112507289-112507314 | GAGCCUAUU | 2382 | GAGCCTATT | 3134 |
| | | | | UUUGGAACC | | TTTGGAACC | |
| | | | | AGCACUU | | AGCACTT | |
| PTPN11 | EXON | + | chr12: 112507290-112507315 | AGCCUAUUU | 2383 | AGCCTATTTT | 3135 |
| | | | | UUGGAACCA | | TGGAACCAG | |
| | | | | GCACUUG | | CACTTG | |
| PTPN11 | EXON | + | chr12: 112507307-112507332 | AGCACUUGG | 2384 | AGCACTTGG | 3136 |
| | | | | GGAAACUGA | | GGAAACTGA | |
| | | | | UCUUGUG | | TCTTGTG | |
| PTPN11 | EXON | + | chr12: 112507311-112507336 | CUUGGGGAA | 2385 | CTTGGGGAA | 3137 |
| | | | | ACUGAUCUU | | ACTGATCTT | |
| | | | | GUGAGGA | | GTGAGGA | |
| PTPN11 | EXON | + | chr12: 112507322-112507347 | UGAUCUUGU | 2386 | TGATCTTGT | 3138 |
| | | | | GAGGAUGGA | | GAGGATGGA | |
| | | | | UGUGUUU | | TGTGTTT | |
| PTPN11 | EXON | + | chr12: 112507323-112507348 | GAUCUUGUG | 2387 | GATCTTGTG | 3139 |
| | | | | AGGAUGGAU | | AGGATGGAT | |
| | | | | GUGUUUA | | GTGTTTA | |
| PTPN11 | EXON | + | chr12: 112507330-112507355 | UGAGGAUGG | 2388 | TGAGGATGG | 3140 |
| | | | | AUGUGUUUA | | ATGTGTTTA | |
| | | | | GGGACAC | | GGGACAC | |
| PTPN11 | EXON | + | chr12: 112507331-112507356 | GAGGAUGGA | 2389 | GAGGATGGA | 3141 |
| | | | | UGUGUUUAG | | TGTGTTTAG | |
| | | | | GGACACA | | GGACACA | |
| PTPN11 | EXON | + | chr12: 112507358-112507383 | GCUUUUGAG | 2390 | GCTTTTGAG | 3142 |
| | | | | AGCAGCACCA | | AGCAGCACC | |
| | | | | CCCCAC | | ACCCCAC | |
| PTPN11 | EXON | + | chr12: 112507359-112507384 | CUUUUGAGA | 2391 | CTTTTGAGA | 3143 |
| | | | | GCAGCACCAC | | GCAGCACCA | |
| | | | | CCCACU | | CCCCACT | |
| PTPN11 | EXON | + | chr12: 112507360-112507385 | UUUUGAGAG | 2392 | TTTTGAGAG | 3144 |
| | | | | CAGCACCACC | | CAGCACCAC | |
| | | | | CCACUG | | CCCACTG | |
| PTPN11 | EXON | + | chr12: 112507375-112507400 | CACCCCACUG | 2393 | CACCCCACT | 3145 |
| | | | | GGGCAUCCCC | | GGGGCATCC | |
| | | | | AGACU | | CCAGACT | |
| PTPN11 | EXON | + | chr12: 112507376-112507401 | ACCCCACUGG | 2394 | ACCCCACTG | 3146 |
| | | | | GGCAUCCCCA | | GGGCATCCC | |
| | | | | GACUU | | CAGACTT | |
| PTPN11 | EXON | + | chr12: 112507404-112507429 | AAACGUGAC | 2395 | AAACGTGAC | 3147 |
| | | | | UCUUUCUUA | | TCTTTCTTAA | |
| | | | | AUGCCAC | | TGCCAC | |
| PTPN11 | EXON | + | chr12: 112507405-112507430 | AACGUGACU | 2396 | AACGTGACT | 3148 |
| | | | | CUUUCUUAA | | CTTTCTTAAT | |
| | | | | UGCCACU | | GCCACT | |
| PTPN11 | EXON | + | chr12: 112507416-112507441 | UUCUUAAUG | 2397 | TTCTTAATGC | 3149 |
| | | | | CCACUGGGU | | CACTGGGTT | |
| | | | | UUUAGUC | | TTAGTC | |
| PTPN11 | EXON | + | chr12: 112507430-112507455 | GGGUUUUAG | 2398 | GGGTTTTAG | 3150 |
| | | | | UCAGGCCACA | | TCAGGCCAC | |
| | | | | GUGAGA | | AGTGAGA | |
| PTPN11 | EXON | + | chr12: 112507445-112507470 | CACAGUGAG | 2399 | CACAGTGAG | 3151 |
| | | | | AAGGAACAG | | AAGGAACAG | |
| | | | | CCCUAAC | | CCCTAAC | |
| PTPN11 | EXON | + | chr12: 112507457-112507482 | GAACAGCCCU | 2400 | GAACAGCCC | 3152 |
| | | | | AACAGGCCUC | | TAACAGGCC | |
| | | | | CAGCC | | TCCAGCC | |
| PTPN11 | EXON | + | chr12: 112507571-112507596 | GCCUCAUAU | 2401 | GCCTCATAT | 3153 |
| | | | | GUUGAAUCA | | GTTGAATCA | |
| | | | | UCCAGUG | | TCCAGTG | |
| PTPN11 | EXON | + | chr12: 112507595-112507620 | GCGGAUAUU | 2402 | GCGGATATT | 3154 |
| | | | | UCAAUGAAA | | TCAATGAAA | |
| | | | | AUAUCAU | | ATATCAT | |
| PTPN11 | EXON | + | chr12: 112507611-112507636 | AAAUAUCAU | 2403 | AAATATCAT | 3155 |
| | | | | UGGUUGACU | | TGGTTGACT | |
| | | | | UUUGUGA | | TTTGTGA | |
| PTPN11 | EXON | + | chr12: 112507625-112507650 | GACUUUUGU | 2404 | GACTTTTGT | 3156 |
| | | | | GAUGGUAAU | | GATGGTAAT | |
| | | | | AAUGCUA | | AATGCTA | |
| PTPN11 | EXON | + | chr12: 112507647-112507672 | CUAUGGCAU | 2405 | CTATGGCAT | 3157 |
| | | | | CUUUGCCAU | | CTTTGCCAT | |
| | | | | GAAGUUG | | GAAGTTG | |
| PTPN11 | EXON | + | chr12: 112507656-112507681 | CUUUGCCAU | 2406 | CTTTGCCAT | 3158 |
| | | | | GAAGUUGUG | | GAAGTTGTG | |
| | | | | GCCUCCU | | GCCTCCT | |
| PTPN11 | EXON | + | chr12: 112507672-112507697 | UGGCCUCCUU | 2407 | TGGCCTCCTT | 3159 |
| | | | | GGAUUCUUC | | GGATTCTTCT | |
| | | | | UGACUU | | GACTT | |
| PTPN11 | EXON | + | chr12: 112507683-112507708 | GAUUCUUCU | 2408 | GATTCTTCTG | 3160 |
| | | | | GACUUUGGC | | ACTTTGGCTT | |
| | | | | UUCUGAA | | CTGAA | |
| PTPN11 | EXON | + | chr12: 112507687-112507712 | CUUCUGACU | 2409 | CTTCTGACTT | 3161 |
| | | | | UUGGCUUCU | | TGGCTTCTG | |
| | | | | GAAAGGA | | AAAGGA | |
| PTPN11 | EXON | + | chr12: 112507704-112507729 | UGAAAGGAA | 2410 | TGAAAGGAA | 3162 |
| | | | | GGCCUAGAU | | GGCCTAGAT | |
| | | | | CCAGCCC | | CCAGCCC | |
| PTPN11 | EXON | + | chr12: 112507707-112507732 | AAGGAAGGC | 2411 | AAGGAAGGC | 3163 |
| | | | | CUAGAUCCA | | CTAGATCCA | |
| | | | | GCCCUGG | | GCCCTGG | |
| PTPN11 | EXON | + | chr12: 112507723-112507748 | CAGCCCUGGU | 2412 | CAGCCCTGG | 3164 |
| | | | | GGUAGUUCC | | TGGTAGTTC | |
| | | | | UUUCUG | | CTTTCTG | |
| PTPN11 | EXON | + | chr12: 112507747-112507772 | GAGGUCUCU | 2413 | GAGGTCTCT | 3165 |
| | | | | CAGUCCCUUG | | CAGTCCCTT | |
| | | | | AGACUU | | GAGACTT | |
| PTPN11 | EXON | + | chr12: 112507748-112507773 | AGGUCUCUC | 2414 | AGGTCTCTC | 3166 |
| | | | | AGUCCCUUG | | AGTCCCTTG | |
| | | | | AGACUUU | | AGACTTT | |
| PTPN11 | EXON | + | chr12: 112507749-112507774 | GGUCUCUCA | 2415 | GGTCTCTCA | 3167 |
| | | | | GUCCCUUGA | | GTCCCTTGA | |
| | | | | GACUUUG | | GACTTTG | |
| PTPN11 | EXON | + | chr12: 112507757-112507782 | AGUCCCUUG | 2416 | AGTCCCTTG | 3168 |
| | | | | AGACUUUGG | | AGACTTTGG | |
| | | | | GGUAGUU | | GGTAGTT | |
| PTPN11 | EXON | + | chr12: 112507843-112507868 | UGAACUUUG | 2417 | TGAACTTTG | 3169 |
| | | | | AAUUGCUUC | | AATTGCTTC | |
| | | | | AGAACAC | | AGAACAC | |
| PTPN11 | EXON | + | chr12: 112507848-112507873 | UUUGAAUUG | 2418 | TTTGAATTG | 3170 |
| | | | | CUUCAGAAC | | CTTCAGAAC | |
| | | | | ACAGGUG | | ACAGGTG | |
| PTPN11 | EXON | + | chr12: 112507856-112507881 | GCUUCAGAA | 2419 | GCTTCAGAA | 3171 |
| | | | | CACAGGUGU | | CACAGGTGT | |
| | | | | GGCCUGA | | GGCCTGA | |
| PTPN11 | EXON | + | chr12: 112507871-112507896 | UGUGGCCUG | 2420 | TGTGGCCTG | 3172 |
| | | | | AAGGUAUUC | | AAGGTATTC | |
| | | | | CCUUAUU | | CCTTATT | |
| PTPN11 | EXON | + | chr12: 112507872-112507897 | GUGGCCUGA | 2421 | GTGGCCTGA | 3173 |
| | | | | AGGUAUUCC | | AGGTATTCC | |
| | | | | CUUAUUA | | CTTATTA | |
| PTPN11 | EXON | + | chr12: 112508001-112508026 | CAUCGACUCA | 2422 | CATCGACTC | 3174 |
| | | | | UUCUCCAUU | | ATTCTCCATT | |
| | | | | UUGCUU | | TTGCTT | |
| PTPN11 | EXON | + | chr12: 112508028-112508053 | GUUUUGUCU | 2423 | GTTTTGTCTT | 3175 |
| | | | | UGACUUGAC | | GACTTGACT | |
| | | | | UUGACUU | | TGACTT | |
| PTPN11 | EXON | + | chr12: 112508029-112508054 | UUUUGUCUU | 2424 | TTTTGTCTTG | 3176 |
| | | | | GACUUGACU | | ACTTGACTT | |
| | | | | UGACUUU | | GACTTT | |
| PTPN11 | EXON | + | chr12: 112508030-112508055 | UUUGUCUUG | 2425 | TTTGTCTTGA | 3177 |
| | | | | ACUUGACUU | | CTTGACTTG | |
| | | | | GACUUUG | | ACTTTG | |
| PTPN11 | EXON | + | chr12: 112508031-112508056 | UUGUCUUGA | 2426 | TTGTCTTGAC | 3178 |
| | | | | CUUGACUUG | | TTGACTTGA | |
| | | | | ACUUUGG | | CTTTGG | |
| PTPN11 | EXON | + | chr12: 112508135-112508160 | AGAUCAGUU | 2427 | AGATCAGTT | 3179 |
| | | | | GCUUUUAUA | | GCTTTTATAC | |
| | | | | CUCAGAA | | TCAGAA | |
| PTPN11 | EXON | + | chr12: 112508151-112508176 | UACUCAGAA | 2428 | TACTCAGAA | 3180 |
| | | | | UGGAAAUAC | | TGGAAATAC | |
| | | | | CUGAUCU | | CTGATCT | |
| PTPN11 | EXON | + | chr12: 112508200-112508225 | GAUUUCAUU | 2429 | GATTTCATTT | 3181 |
| | | | | UAGAUUUCC | | AGATTTCCC | |
| | | | | CUCCACG | | TCCACG | |
| PTPN11 | EXON | + | chr12: 112508234-112508259 | AACUAUCAU | 2430 | AACTATCAT | 3182 |
| | | | | GUUCUUAUG | | GTTCTTATGT | |
| | | | | UAAACUU | | AAACTT | |
| PTPN11 | EXON | + | chr12: 112508240-112508265 | CAUGUUCUU | 2431 | CATGTTCTTA | 3183 |
| | | | | AUGUAAACU | | TGTAAACTT | |
| | | | | UAGGCCA | | AGGCCA | |
| PTPN11 | EXON | + | chr12: 112508263-112508288 | CAAGGCCAG | 2432 | CAAGGCCAG | 3184 |
| | | | | AGUUAUCAU | | AGTTATCAT | |
| | | | | AGUCCCU | | AGTCCCT | |
| PTPN11 | EXON | + | chr12: 112508272-112508297 | AGUUAUCAU | 2433 | AGTTATCAT | 3185 |
| | | | | AGUCCCUAG | | AGTCCCTAG | |
| | | | | GUUGCUA | | GTTGCTA | |
| PTPN11 | EXON | + | chr12: 112508288-112508313 | AGGUUGCUA | 2434 | AGGTTGCTA | 3186 |
| | | | | CGGCUUAUC | | CGGCTTATC | |
| | | | | AUGUGCU | | ATGTGCT | |
| PTPN11 | EXON | + | chr12: 112508295-112508320 | UACGGCUUA | 2435 | TACGGCTTA | 3187 |
| | | | | UCAUGUGCU | | TCATGTGCTT | |
| | | | | UGGUAAA | | GGTAAA | |
| PTPN11 | EXON | + | chr12: 112508305-112508330 | CAUGUGCUU | 2436 | CATGTGCTT | 3188 |
| | | | | GGUAAAAGG | | GGTAAAAGG | |
| | | | | UGAUCGC | | TGATCGC | |
| PTPN11 | EXON | + | chr12: 112508336-112508361 | UCAGACGAG | 2437 | TCAGACGAG | 3189 |
| | | | | UUUACUUUA | | TTTACTTTAC | |
| | | | | CAUGAGA | | ATGAGA | |
| PTPN11 | EXON | + | chr12: 112508343-112508368 | AGUUUACUU | 2438 | AGTTTACTTT | 3190 |
| | | | | UACAUGAGA | | ACATGAGAT | |
| | | | | UGGAAUC | | GGAATC | |
| PTPN11 | EXON | + | chr12: 112508351-112508376 | UUACAUGAG | 2439 | TTACATGAG | 3191 |
| | | | | AUGGAAUCA | | ATGGAATCA | |
| | | | | GGCAGAG | | GGCAGAG | |
| PTPN11 | EXON | + | chr12: 112508355-112508380 | AUGAGAUGG | 2440 | ATGAGATGG | 3192 |
| | | | | AAUCAGGCA | | AATCAGGCA | |
| | | | | GAGAGGC | | GAGAGGC | |
| PTPN11 | EXON | + | chr12: 112508356-112508381 | UGAGAUGGA | 2441 | TGAGATGGA | 3193 |
| | | | | AUCAGGCAG | | ATCAGGCAG | |
| | | | | AGAGGCU | | AGAGGCT | |
| PTPN11 | EXON | + | chr12: 112508363-112508388 | GAAUCAGGC | 2442 | GAATCAGGC | 3194 |
| | | | | AGAGAGGCU | | AGAGAGGCT | |
| | | | | GGGAUGA | | GGGATGA | |
| PTPN11 | EXON | + | chr12: 112508376-112508401 | AGGCUGGGA | 2443 | AGGCTGGGA | 3195 |
| | | | | UGAUGGAGA | | TGATGGAGA | |
| | | | | AAGCUCG | | AAGCTCG | |
| PTPN11 | EXON | + | chr12: 112508401-112508426 | AGGUGAAGU | 2444 | AGGTGAAGT | 3196 |
| | | | | UUUAAAAAA | | TTTAAAAAA | |
| | | | | AAAGUUG | | AAAGTTG | |
| PTPN11 | EXON | + | chr12: 112508406-112508431 | AAGUUUUAA | 2445 | AAGTTTTAA | 3197 |
| | | | | AAAAAAAGU | | AAAAAAAGT | |
| | | | | UGUGGAA | | TGTGGAA | |
| PTPN11 | EXON | + | chr12: 112508421-112508446 | AGUUGUGGA | 2446 | AGTTGTGGA | 3198 |
| | | | | AAGGAAAGU | | AAGGAAAGT | |
| | | | | UCCAAAG | | TCCAAAG | |
| PTPN11 | EXON | + | chr12: 112508424-112508449 | UGUGGAAAG | 2447 | TGTGGAAAG | 3199 |
| | | | | GAAAGUUCC | | GAAAGTTCC | |
| | | | | AAAGAGG | | AAAGAGG | |
| PTPN11 | EXON | + | chr12: 112508433-112508458 | GAAAGUUCC | 2448 | GAAAGTTCC | 3200 |
| | | | | AAAGAGGUG | | AAAGAGGTG | |
| | | | | GUUUCUG | | GTTTCTG | |
| PTPN11 | EXON | + | chr12: 112508450-112508475 | GGUUUCUGA | 2449 | GGTTTCTGA | 3201 |
| | | | | GGAAGUCAG | | GGAAGTCAG | |
| | | | | AGCGCCC | | AGCGCCC | |
| PTPN11 | EXON | + | chr12: 112508451-112508476 | GUUUCUGAG | 2450 | GTTTCTGAG | 3202 |
| | | | | GAAGUCAGA | | GAAGTCAGA | |
| | | | | GCGCCCA | | GCGCCCA | |
| PTPN11 | EXON | + | chr12: 112508470-112508495 | CGCCCAGGGC | 2451 | CGCCCAGGG | 3203 |
| | | | | CAGAGCAGU | | CCAGAGCAG | |
| | | | | CAGUAA | | TCAGTAA | |
| PTPN11 | EXON | + | chr12: 112508471-112508496 | GCCCAGGGCC | 2452 | GCCCAGGGC | 3204 |
| | | | | AGAGCAGUC | | CAGAGCAGT | |
| | | | | AGUAAU | | CAGTAAT | |
| PTPN11 | EXON | + | chr12: 112508480-112508505 | CAGAGCAGU | 2453 | CAGAGCAGT | 3205 |
| | | | | CAGUAAUGG | | CAGTAATGG | |
| | | | | GUGAAUG | | GTGAATG | |
| PTPN11 | EXON | + | chr12: 112508488-112508513 | UCAGUAAUG | 2454 | TCAGTAATG | 3206 |
| | | | | GGUGAAUGA | | GGTGAATGA | |
| | | | | GGUUGUU | | GGTTGTT | |
| PTPN11 | EXON | + | chr12: 112508496-112508521 | GGGUGAAUG | 2455 | GGGTGAATG | 3207 |
| | | | | AGGUUGUUU | | AGGTTGTTT | |
| | | | | GGAAAGU | | GGAAAGT | |
| PTPN11 | EXON | + | chr12: 112508512-112508537 | UUGGAAAGU | 2456 | TTGGAAAGT | 3208 |
| | | | | CGGUGUGAC | | CGGTGTGAC | |
| | | | | AGACACA | | AGACACA | |
| PTPN11 | EXON | + | chr12: 112508530-112508555 | AGACACAUG | 2457 | AGACACATG | 3209 |
| | | | | GAUGCCAUC | | GATGCCATC | |
| | | | | UACUUCU | | TACTTCT | |
| PTPN11 | EXON | + | chr12: 112508537-112508562 | UGGAUGCCA | 2458 | TGGATGCCA | 3210 |
| | | | | UCUACUUCU | | TCTACTTCTA | |
| | | | | AGGUUGC | | GGTTGC | |
| PTPN11 | EXON | + | chr12: 112508540-112508565 | AUGCCAUCU | 2459 | ATGCCATCT | 3211 |
| | | | | ACUUCUAGG | | ACTTCTAGG | |
| | | | | UUGCUGG | | TTGCTGG | |
| PTPN11 | EXON | + | chr12: 112508541-112508566 | UGCCAUCUAC | 2460 | TGCCATCTA | 3212 |
| | | | | UUCUAGGUU | | CTTCTAGGTT | |
| | | | | GCUGGU | | GCTGGT | |
| PTPN11 | EXON | + | chr12: 112508577-112508602 | AUGCACAAU | 2461 | ATGCACAAT | 3213 |
| | | | | AUUCCAUAG | | ATTCCATAG | |
| | | | | CUCACUG | | CTCACTG | |
| PTPN11 | EXON | + | chr12: 112508599-112508624 | CUGAGGAUU | 2462 | CTGAGGATT | 3214 |
| | | | | UUAAAAUUA | | TTAAAATTA | |
| | | | | UAAGCAU | | TAAGCAT | |
| PTPN11 | EXON | + | chr12: 112508613-112508638 | AUUAUAAGC | 2463 | ATTATAAGC | 3215 |
| | | | | AUAGGAUUU | | ATAGGATTT | |
| | | | | UAUAUUU | | TATATTT | |
| PTPN11 | EXON | + | chr12: 112508614-112508639 | UUAUAAGCA | 2464 | TTATAAGCA | 3216 |
| | | | | UAGGAUUUU | | TAGGATTTT | |
| | | | | AUAUUUU | | ATATTTT | |
| PTPN11 | EXON | + | chr12: 112508615-112508640 | UAUAAGCAU | 2465 | TATAAGCAT | 3217 |
| | | | | AGGAUUUUA | | AGGATTTTA | |
| | | | | UAUUUUG | | TATTTTG | |
| PTPN11 | EXON | + | chr12: 112508631-112508656 | UAUAUUUUG | 2466 | TATATTTTGG | 3218 |
| | | | | GGGUGAAAG | | GGTGAAAGA | |
| | | | | AAUUAUC | | ATTATC | |
| PTPN11 | EXON | + | chr12: 112508640-112508665 | GGGUGAAAG | 2467 | GGGTGAAAG | 3219 |
| | | | | AAUUAUCUG | | AATTATCTG | |
| | | | | GCACAUU | | GCACATT | |
| PTPN11 | EXON | + | chr12: 112508646-112508671 | AAGAAUUAU | 2468 | AAGAATTAT | 3220 |
| | | | | CUGGCACAU | | CTGGCACAT | |
| | | | | UAGGUAU | | TAGGTAT | |
| PTPN11 | EXON | + | chr12: 112508707-112508732 | AUAACUUUU | 2469 | ATAACTTTTT | 3221 |
| | | | | UUUAAAAAA | | TTAAAAAAA | |
| | | | | AACUAAA | | ACTAAA | |
| PTPN11 | EXON | + | chr12: 112508728-112508753 | UAAAAGGCG | 2470 | TAAAAGGCG | 3222 |
| | | | | CUUCAUGUCC | | CTTCATGTCC | |
| | | | | AGUGUG | | AGTGTG | |
| PTPN11 | EXON | + | chr12: 112508746-112508771 | CAGUGUGUG | 2471 | CAGTGTGTG | 3223 |
| | | | | GCCCUUCUGA | | GCCCTTCTG | |
| | | | | AACUUA | | AAACTTA | |
| PTPN11 | EXON | + | chr12: 112508770-112508795 | AUGGUCAUC | 2472 | ATGGTCATC | 3224 |
| | | | | UCUCCCACUG | | TCTCCCACT | |
| | | | | AAACCA | | GAAACCA | |
| PTPN11 | EXON | + | chr12: 112508785-112508810 | ACUGAAACC | 2473 | ACTGAAACC | 3225 |
| | | | | AAGGUCUUU | | AAGGTCTTT | |
| | | | | UCAAAUG | | TCAAATG | |
| PTPN11 | EXON | + | chr12: 112508793-112508818 | CAAGGUCUU | 2474 | CAAGGTCTT | 3226 |
| | | | | UUCAAAUGU | | TTCAAATGT | |
| | | | | GGCUAAA | | GGCTAAA | |
| PTPN11 | EXON | + | chr12: 112508794-112508819 | AAGGUCUUU | 2475 | AAGGTCTTT | 3227 |
| | | | | UCAAAUGUG | | TCAAATGTG | |
| | | | | GCUAAAU | | GCTAAAT | |
| PTPN11 | EXON | + | chr12: 112508795-112508820 | AGGUCUUUU | 2476 | AGGTCTTTTC | 3228 |
| | | | | CAAAUGUGG | | AAATGTGGC | |
| | | | | CUAAAUG | | TAAATG | |
| PTPN11 | EXON | + | chr12: 112508801-112508826 | UUUCAAAUG | 2477 | TTTCAAATG | 3229 |
| | | | | UGGCUAAAU | | TGGCTAAAT | |
| | | | | GGGGAUG | | GGGGATG | |
| PTPN11 | EXON | + | chr12: 112508809-112508834 | GUGGCUAAA | 2478 | GTGGCTAAA | 3230 |
| | | | | UGGGGAUGA | | TGGGGATGA | |
| | | | | GGAGACA | | GGAGACA | |
| PTPN11 | EXON | + | chr12: 112508810-112508835 | UGGCUAAAU | 2479 | TGGCTAAAT | 3231 |
| | | | | GGGGAUGAG | | GGGGATGAG | |
| | | | | GAGACAC | | GAGACAC | |
| PTPN11 | EXON | + | chr12: 112508814-112508839 | UAAAUGGGG | 2480 | TAAATGGGG | 3232 |
| | | | | AUGAGGAGA | | ATGAGGAGA | |
| | | | | CACGGGU | | CACGGGT | |
| PTPN11 | EXON | + | chr12: 112508824-112508849 | UGAGGAGAC | 2481 | TGAGGAGAC | 3233 |
| | | | | ACGGGUAGG | | ACGGGTAGG | |
| | | | | ACUUUCU | | ACTTTCT | |
| PTPN11 | EXON | + | chr12: 112508860-112508885 | CAUUCUUUA | 2482 | CATTCTTTAA | 3234 |
| | | | | AAGAGCCAA | | AGAGCCAAG | |
| | | | | GUUGCUU | | TTGCTT | |
| PTPN11 | EXON | + | chr12: 112508861-112508886 | AUUCUUUAA | 2483 | ATTCTTTAA | 3235 |
| | | | | AGAGCCAAG | | AGAGCCAAG | |
| | | | | UUGCUUC | | TTGCTTC | |
| PTPN11 | EXON | + | chr12: 112508862-112508887 | UUCUUUAAA | 2484 | TTCTTTAAA | 3236 |
| | | | | GAGCCAAGU | | GAGCCAAGT | |
| | | | | UGCUUCG | | TGCTTCG | |
| PTPN11 | EXON | + | chr12: 112508873-112508898 | GCCAAGUUG | 2485 | GCCAAGTTG | 3237 |
| | | | | CUUCGGGGA | | CTTCGGGGA | |
| | | | | AACAGCC | | AACAGCC | |
| PTPN11 | EXON | + | chr12: 112508880-112508905 | UGCUUCGGG | 2486 | TGCTTCGGG | 3238 |
| | | | | GAAACAGCC | | GAAACAGCC | |
| | | | | AGGAAAA | | AGGAAAA | |
| PTPN11 | EXON | + | chr12: 112508899-112508924 | GGAAAAUGG | 2487 | GGAAAATGG | 3239 |
| | | | | UCAAGAUUA | | TCAAGATTA | |
| | | | | UUUUUAG | | TTTTTAG | |
| PTPN11 | EXON | + | chr12: 112508911-112508936 | AGAUUAUUU | 2488 | AGATTATTTT | 3240 |
| | | | | UUAGAGGUU | | TAGAGGTTA | |
| | | | | AUUUUAU | | TTTTAT | |
| PTPN11 | EXON | + | chr12: 112508912-112508937 | GAUUAUUUU | 2489 | GATTATTTTT | 3241 |
| | | | | UAGAGGUUA | | AGAGGTTAT | |
| | | | | UUUUAUU | | TTTATT | |
| PTPN11 | EXON | + | chr12: 112508913-112508938 | AUUAUUUUU | 2490 | ATTATTTTTA | 3242 |
| | | | | AGAGGUUAU | | GAGGTTATT | |
| | | | | UUUAUUG | | TTATTG | |
| PTPN11 | EXON | + | chr12: 112508955-112508980 | UAACAUCUU | 2491 | TAACATCTT | 3243 |
| | | | | GAGUUAUUU | | GAGTTATTTT | |
| | | | | UUAAUUC | | TAATTC | |
| PTPN11 | EXON | + | chr12: 112508956-112508981 | AACAUCUUG | 2492 | AACATCTTG | 3244 |
| | | | | AGUUAUUUU | | AGTTATTTTT | |
| | | | | UAAUUCA | | AATTCA | |
| PTPN11 | EXON | + | chr12: 112508957-112508982 | ACAUCUUGA | 2493 | ACATCTTGA | 3245 |
| | | | | GUUAUUUUU | | GTTATTTTTA | |
| | | | | AAUUCAG | | ATTCAG | |
| PTPN11 | EXON | + | chr12: 112508958-112508983 | CAUCUUGAG | 2494 | CATCTTGAG | 3246 |
| | | | | UUAUUUUUA | | TTATTTTTAA | |
| | | | | AUUCAGG | | TTCAGG | |
| PTPN11 | EXON | + | chr12: 112508964-112508989 | GAGUUAUUU | 2495 | GAGTTATTTT | 3247 |
| | | | | UUAAUUCAG | | TAATTCAGG | |
| | | | | GGGGAUG | | GGGATG | |
| PTPN11 | EXON | + | chr12: 112508969-112508994 | AUUUUUAAU | 2496 | ATTTTTAATT | 3248 |
| | | | | UCAGGGGGA | | CAGGGGGAT | |
| | | | | UGUGGAA | | GTGGAA | |
| PTPN11 | EXON | + | chr12: 112509013-112509038 | GUUUUGUUG | 2497 | GTTTTGTTGT | 3249 |
| | | | | UAGCUUAGU | | AGCTTAGTA | |
| | | | | AUCCAUA | | TCCATA | |
| PTPN11 | EXON | + | chr12: 112509014-112509039 | UUUUGUUGU | 2498 | TTTTGTTGTA | 3250 |
| | | | | AGCUUAGUA | | GCTTAGTAT | |
| | | | | UCCAUAA | | CCATAA | |
| PTPN11 | EXON | + | chr12: 112509076-112509101 | GCAGCUUUU | 2499 | GCAGCTTTT | 3251 |
| | | | | GUUUUCUGU | | GTTTTCTGTA | |
| | | | | AUGUUGU | | TGTTGT | |
| PTPN11 | EXON | + | chr12: 112509077-112509102 | CAGCUUUUG | 2500 | CAGCTTTTGT | 3252 |
| | | | | UUUUCUGUA | | TTTCTGTATG | |
| | | | | UGUUGUU | | TTGTT | |
| PTPN11 | EXON | + | chr12: 112509078-112509103 | AGCUUUUGU | 2501 | AGCTTTTGTT | 3253 |
| | | | | UUUCUGUAU | | TTCTGTATGT | |
| | | | | GUUGUUG | | TGTTG | |
| PTPN11 | EXON | + | chr12: 112509079-112509104 | GCUUUUGUU | 2502 | GCTTTTGTTT | 3254 |
| | | | | UUCUGUAUG | | TCTGTATGTT | |
| | | | | UUGUUGG | | GTTGG | |
| PTPN11 | EXON | + | chr12: 112509108-112509133 | UCAACUUUC | 2503 | TCAACTTTC | 3255 |
| | | | | ACACAUAGC | | ACACATAGC | |
| | | | | AAGCACA | | AAGCACA | |
| PTPN11 | EXON | + | chr12: 112509124-112509149 | GCAAGCACA | 2504 | GCAAGCACA | 3256 |
| | | | | UGGCCUCCCU | | TGGCCTCCC | |
| | | | | GAUGUC | | TGATGTC | |
| PTPN11 | EXON | + | chr12: 112509138-112509163 | UCCCUGAUG | 2505 | TCCCTGATG | 3257 |
| | | | | UCAGGAUGC | | TCAGGATGC | |
| | | | | CUUUGUU | | CTTTGTT | |
| PTPN11 | EXON | + | chr12: 112509254-112509279 | CUAAAAAUU | 2506 | CTAAAAATT | 3258 |
| | | | | UGUUCCUUU | | TGTTCCTTTT | |
| | | | | UUCACUA | | TCACTA | |
| PTPN11 | EXON | + | chr12: 112509255-112509280 | UAAAAAUUU | 2507 | TAAAAATTT | 3259 |
| | | | | GUUCCUUUU | | GTTCCTTTTT | |
| | | | | UCACUAU | | CACTAT | |
| PTPN11 | EXON | + | chr12: 112509269-112509294 | UUUUUCACU | 2508 | TTTTTCACTA | 3260 |
| | | | | AUGGGCAGU | | TGGGCAGTT | |
| | | | | UCACACA | | CACACA | |
| PTPN11 | EXON | + | chr12: 112509290-112509315 | CACAAGGCA | 2509 | CACAAGGCA | 3261 |
| | | | | AAAACUAUU | | AAAACTATT | |
| | | | | GAACAGU | | GAACAGT | |
| PTPN11 | EXON | + | chr12: 112509429-112509454 | UGAUUCUUU | 2510 | TGATTCTTTT | 3262 |
| | | | | UAUUAAUAA | | ATTAATAAA | |
| | | | | AAGCUAA | | AGCTAA | |
| PTPN11 | EXON | + | chr12: 112509430-112509455 | GAUUCUUUU | 2511 | GATTCTTTTA | 3263 |
| | | | | AUUAAUAAA | | TTAATAAAA | |
| | | | | AGCUAAU | | GCTAAT | |
| PTPN11 | EXON | + | chr12: 112509436-112509461 | UUUAUUAAU | 2512 | TTTATTAATA | 3264 |
| | | | | AAAAGCUAA | | AAAGCTAAT | |
| | | | | UGGGAAA | | GGGAAA | |
| PTPN11 | EXON | + | chr12: 112509553-112509578 | UUUAUUGAU | 2513 | TTTATTGATA | 3265 |
| | | | | AAAUCUAUC | | AATCTATCC | |
| | | | | CUUUAAA | | TTTAAA | |
| PTPN11 | EXON | + | chr12: 112509566-112509591 | CUAUCCUUU | 2514 | CTATCCTTTA | 3266 |
| | | | | AAAAGGAAU | | AAAGGAATA | |
| | | | | ACGUUUU | | CGTTTT | |
| PTPN11 | EXON | + | chr12: 112509744-112509769 | AAUAGUUUA | 2515 | AATAGTTTA | 3267 |
| | | | | UGUAGAGAA | | TGTAGAGAA | |
| | | | | ACAUUAG | | ACATTAG | |
| PTPN11 | EXON | + | chr12: 112509775-112509800 | UUAAUUGUC | 2516 | TTAATTGTCT | 3268 |
| | | | | UCCCCACCUA | | CCCCACCTA | |
| | | | | UAUUUA | | TATTTA | |
| PTPN11 | EXON | + | chr12: 112509776-112509801 | UAAUUGUCU | 2517 | TAATTGTCTC | 3269 |
| | | | | CCCCACCUAU | | CCCACCTAT | |
| | | | | AUUUAU | | ATTTAT | |
| PTPN11 | EXON | + | chr12: 112509847-112509872 | AGUAAAAGU | 2518 | AGTAAAAGT | 3270 |
| | | | | GUAUUUGUA | | GTATTTGTA | |
| | | | | AACUGUA | | AACTGTA | |
| PTPN11 | EXON | + | chr12: 112509848-112509873 | GUAAAAGUG | 2519 | GTAAAAGTG | 3271 |
| | | | | UAUUUGUAA | | TATTTGTAA | |
| | | | | ACUGUAU | | ACTGTAT | |
| PTPN11 | EXON | + | chr12: 112509862-112509887 | GUAAACUGU | 2520 | GTAAACTGT | 3272 |
| | | | | AUGGGAACU | | ATGGGAACT | |
| | | | | AAAAAUU | | AAAAATT | |
| PTPN11 | EXON | + | chr12: 112509888-112509913 | GGAAUAAAA | 2521 | GGAATAAAA | 3273 |
| | | | | CCAUUUUCU | | CCATTTTCTT | |
| | | | | UAUAUGA | | ATATGA | |
| PTPN11 | EXON | − | chr12: 112505821-112505846 | GGGAGAGGG | 2522 | GGGAGAGGG | 3274 |
| | | | | UGAAAGUCC | | TGAAAGTCC | |
| | | | | ACAUCUG | | ACATCTG | |
| PTPN11 | EXON | − | chr12: 112505822-112505847 | AGGGAGAGG | 2523 | AGGGAGAGG | 3275 |
| | | | | GUGAAAGUC | | GTGAAAGTC | |
| | | | | CACAUCU | | CACATCT | |
| PTPN11 | EXON | − | chr12: 112505823-112505848 | UAGGGAGAG | 2524 | TAGGGAGAG | 3276 |
| | | | | GGUGAAAGU | | GGTGAAAGT | |
| | | | | CCACAUC | | CCACATC | |
| PTPN11 | EXON | − | chr12: 112505840-112505865 | UCUGUUCUU | 2525 | TCTGTTCTTG | 3277 |
| | | | | GAUCUUUUU | | ATCTTTTTAG | |
| | | | | AGGGAGA | | GGAGA | |
| PTPN11 | EXON | − | chr12: 112505841-112505866 | GUCUGUUCU | 2526 | GTCTGTTCTT | 3278 |
| | | | | UGAUCUUUU | | GATCTTTTTA | |
| | | | | UAGGGAG | | GGGAG | |
| PTPN11 | EXON | − | chr12: 112505846-112505871 | CUUGCGUCU | 2527 | CTTGCGTCT | 3279 |
| | | | | GUUCUUGAU | | GTTCTTGATC | |
| | | | | CUUUUUA | | TTTTTA | |
| PTPN11 | EXON | − | chr12: 112505847-112505872 | UCUUGCGUC | 2528 | TCTTGCGTCT | 3280 |
| | | | | UGUUCUUGA | | GTTCTTGATC | |
| | | | | UCUUUUU | | TTTTT | |
| PTPN11 | EXON | − | chr12: 112505929-112505954 | AUGGUUUCA | 2529 | ATGGTTTCA | 3281 |
| | | | | AAUUUUGCU | | AATTTTGCTT | |
| | | | | UAUCAAA | | ATCAAA | |
| PTPN11 | EXON | − | chr12: 112505953-112505978 | GAGUUAAAA | 2530 | GAGTTAAAA | 3282 |
| | | | | UACAGUGGU | | TACAGTGGT | |
| | | | | CUUUAAA | | CTTTAAA | |
| PTPN11 | EXON | − | chr12: 112505964-112505989 | CAGGUAUUG | 2531 | CAGGTATTG | 3283 |
| | | | | UUGAGUUAA | | TTGAGTTAA | |
| | | | | AAUACAG | | AATACAG | |
| PTPN11 | EXON | − | chr12: 112505988-112506013 | CUGAGGAAA | 2532 | CTGAGGAAA | 3284 |
| | | | | UGAGUAAUU | | TGAGTAATT | |
| | | | | GGGAAGC | | GGGAAGC | |
| PTPN11 | EXON | − | chr12: 112505995-112506020 | UUCUUAUCU | 2533 | TTCTTATCTG | 3285 |
| | | | | GAGGAAAUG | | AGGAAATGA | |
| | | | | AGUAAUU | | GTAATT | |
| PTPN11 | EXON | − | chr12: 112505996-112506021 | CUUCUUAUC | 2534 | CTTCTTATCT | 3286 |
| | | | | UGAGGAAAU | | GAGGAAATG | |
| | | | | GAGUAAU | | AGTAAT | |
| PTPN11 | EXON | − | chr12: 112506010-112506035 | UGUAGAGAU | 2535 | TGTAGAGAT | 3287 |
| | | | | GAUUUCUUC | | GATTTCTTCT | |
| | | | | UUAUCUG | | TATCTG | |
| PTPN11 | EXON | − | chr12: 112506164-112506189 | GGAAAAAAA | 2536 | GGAAAAAAA | 3288 |
| | | | | AAAUUAAAC | | AAATTAAAC | |
| | | | | UGGUUAA | | TGGTTAA | |
| PTPN11 | EXON | − | chr12: 112506165-112506190 | AGGAAAAAA | 2537 | AGGAAAAAA | 3289 |
| | | | | AAAAUUAAA | | AAAATTAAA | |
| | | | | CUGGUUA | | CTGGTTA | |
| PTPN11 | EXON | − | chr12: 112506171-112506196 | ACAAUGAGG | 2538 | ACAATGAGG | 3290 |
| | | | | AAAAAAAAA | | AAAAAAAAA | |
| | | | | AUUAAAC | | ATTAAAC | |
| PTPN11 | EXON | − | chr12: 112506190-112506215 | UUUCUUCUC | 2539 | TTTCTTCTCA | 3291 |
| | | | | AUCAUCCCCA | | TCATCCCCA | |
| | | | | ACAAUG | | ACAATG | |
| PTPN11 | EXON | − | chr12: 112506245-112506270 | UAAAUGAGA | 2540 | TAAATGAGA | 3292 |
| | | | | UUGUUCUCA | | TTGTTCTCAC | |
| | | | | CUUUUCU | | TTTTCT | |
| PTPN11 | EXON | − | chr12: 112506273-112506298 | GAAUUAUCC | 2541 | GAATTATCC | 3293 |
| | | | | ACUACUGGA | | ACTACTGGA | |
| | | | | UACAUGA | | TACATGA | |
| PTPN11 | EXON | − | chr12: 112506284-112506309 | GCCAUCAAA | 2542 | GCCATCAAA | 3294 |
| | | | | AUGAAUUAU | | ATGAATTAT | |
| | | | | CCACUAC | | CCACTAC | |
| PTPN11 | EXON | − | chr12: 112506324-112506349 | CUCAGGCACU | 2543 | CTCAGGCAC | 3295 |
| | | | | GGCUUAAUU | | TGGCTTAAT | |
| | | | | CUCAUU | | TCTCATT | |
| PTPN11 | EXON | − | chr12: 112506340-112506365 | GUCAACUUC | 2544 | GTCAACTTC | 3296 |
| | | | | UGACAGUCU | | TGACAGTCT | |
| | | | | CAGGCAC | | CAGGCAC | |
| PTPN11 | EXON | − | chr12: 112506346-112506371 | GCAAAGGUC | 2545 | GCAAAGGTC | 3297 |
| | | | | AACUUCUGA | | AACTTCTGA | |
| | | | | CAGUCUC | | CAGTCTC | |
| PTPN11 | EXON | − | chr12: 112506367-112506392 | CUAUGACUC | 2546 | CTATGACTC | 3298 |
| | | | | UUUAAUGCC | | TTTAATGCC | |
| | | | | AGUGCAA | | AGTGCAA | |
| PTPN11 | EXON | − | chr12: 112506458-112506483 | AGCCGAACU | 2547 | AGCCGAACT | 3299 |
| | | | | AUAAUUGGU | | ATAATTGGT | |
| | | | | CAACGGC | | CAACGGC | |
| PTPN11 | EXON | − | chr12: 112506462-112506487 | CAACAGCCGA | 2548 | CAACAGCCG | 3300 |
| | | | | ACUAUAAUU | | AACTATAAT | |
| | | | | GGUCAA | | TGGTCAA | |
| PTPN11 | EXON | − | chr12: 112506469-112506494 | UCUCAGUCA | 2549 | TCTCAGTCA | 3301 |
| | | | | ACAGCCGAAC | | ACAGCCGAA | |
| | | | | UAUAAU | | CTATAAT | |
| PTPN11 | EXON | − | chr12: 112506520-112506545 | CAAUUAUUC | 2550 | CAATTATTC | 3302 |
| | | | | AAAUGCAAA | | AAATGCAAA | |
| | | | | GAAAAUA | | GAAAATA | |
| PTPN11 | EXON | − | chr12: 112506581-112506606 | UCGUUGUUU | 2551 | TCGTTGTTTT | 3303 |
| | | | | UGGCGACCA | | GGCGACCAA | |
| | | | | AAAACAC | | AAACAC | |
| PTPN11 | EXON | − | chr12: 112506597-112506622 | AACCCUAUUC | 2552 | AACCCTATT | 3304 |
| | | | | AAACAGUCG | | CAAACAGTC | |
| | | | | UUGUUU | | GTTGTTT | |
| PTPN11 | EXON | − | chr12: 112506620-112506645 | CCAAAAAAA | 2553 | CCAAAAAAA | 3305 |
| | | | | UUCGGUGAU | | TTCGGTGAT | |
| | | | | UUCAAAA | | TTCAAAA | |
| PTPN11 | EXON | − | chr12: 112506621-112506646 | UCCAAAAAA | 2554 | TCCAAAAAA | 3306 |
| | | | | AUUCGGUGA | | ATTCGGTGA | |
| | | | | UUUCAAA | | TTTCAAA | |
| PTPN11 | EXON | − | chr12: 112506646-112506671 | GAGUCUAAC | 2555 | GAGTCTAAC | 3307 |
| | | | | UGAUUGUCA | | TGATTGTCA | |
| | | | | ACCCCCG | | ACCCCCG | |
| PTPN11 | EXON | − | chr12: 112506650-112506675 | GGUCGAGUC | 2556 | GGTCGAGTC | 3308 |
| | | | | UAACUGAUU | | TAACTGATT | |
| | | | | GUCAACC | | GTCAACC | |
| PTPN11 | EXON | − | chr12: 112506651-112506676 | GGGUCGAGU | 2557 | GGGTCGAGT | 3309 |
| | | | | CUAACUGAU | | CTAACTGAT | |
| | | | | UGUCAAC | | TGTCAAC | |
| PTPN11 | EXON | − | chr12: 112506652-112506677 | CGGGUCGAG | 2558 | CGGGTCGAG | 3310 |
| | | | | UCUAACUGA | | TCTAACTGA | |
| | | | | UUGUCAA | | TTGTCAA | |
| PTPN11 | EXON | − | chr12: 112506653-112506678 | UCGGGUCGA | 2559 | TCGGGTCGA | 3311 |
| | | | | GUCUAACUG | | GTCTAACTG | |
| | | | | AUUGUCA | | ATTGTCA | |
| PTPN11 | EXON | − | chr12: 112506700-112506725 | UGGUGUACU | 2560 | TGGTGTACT | 3312 |
| | | | | CACCGGUGG | | CACCGGTGG | |
| | | | | ACGUCCG | | ACGTCCG | |
| PTPN11 | EXON | − | chr12: 112506704-112506729 | CGACUGGUG | 2561 | CGACTGGTG | 3313 |
| | | | | UACUCACCGG | | TACTCACCG | |
| | | | | UGGACG | | GTGGACG | |
| PTPN11 | EXON | − | chr12: 112506715-112506740 | AGGCGGCUG | 2562 | AGGCGGCTG | 3314 |
| | | | | GACGACUGG | | GACGACTGG | |
| | | | | UGUACUC | | TGTACTC | |
| PTPN11 | EXON | − | chr12: 112506773-112506798 | GCUUCUUCCU | 2563 | GCTTCTTCCT | 3315 |
| | | | | CUCUGAGUCC | | CTCTGAGTC | |
| | | | | UGACG | | CTGACG | |
| PTPN11 | EXON | − | chr12: 112506781-112506806 | UCUGAUGUG | 2564 | TCTGATGTG | 3316 |
| | | | | CUUCUUCCUC | | CTTCTTCCTC | |
| | | | | UCUGAG | | TCTGAG | |
| PTPN11 | EXON | − | chr12: 112506792-112506817 | CGGUGACUU | 2565 | CGGTGACTT | 3317 |
| | | | | UCUCUGAUG | | TCTCTGATGT | |
| | | | | UGCUUCU | | GCTTCT | |
| PTPN11 | EXON | − | chr12: 112506819-112506844 | CUCUCCAGAU | 2566 | CTCTCCAGA | 3318 |
| | | | | CGAUGGGAC | | TCGATGGGA | |
| | | | | GGUCGG | | CGGTCGG | |
| PTPN11 | EXON | − | chr12: 112506841-112506866 | AACCCUCGAG | 2567 | AACCCTCGA | 3319 |
| | | | | ACUCGACGU | | GACTCGACG | |
| | | | | ACACUC | | TACACTC | |
| PTPN11 | EXON | − | chr12: 112506864-112506889 | ACCGGUAAA | 2568 | ACCGGTAAA | 3320 |
| | | | | GACGAAAAC | | GACGAAAAC | |
| | | | | UCGAGAA | | TCGAGAA | |
| PTPN11 | EXON | − | chr12: 112506865-112506890 | GACCGGUAA | 2569 | GACCGGTAA | 3321 |
| | | | | AGACGAAAA | | AGACGAAAA | |
| | | | | CUCGAGA | | CTCGAGA | |
| PTPN11 | EXON | − | chr12: 112506889-112506914 | AGACCUGAA | 2570 | AGACCTGAA | 3322 |
| | | | | UUCAAAAGU | | TTCAAAAGT | |
| | | | | CUUCCGG | | CTTCCGG | |
| PTPN11 | EXON | − | chr12: 112506894-112506919 | UGUUAAGAC | 2571 | TGTTAAGAC | 3323 |
| | | | | CUGAAUUCA | | CTGAATTCA | |
| | | | | AAAGUCU | | AAAGTCT | |
| PTPN11 | EXON | − | chr12: 112506912-112506937 | UCAUCUUCCC | 2572 | TCATCTTCCC | 3324 |
| | | | | UGUGACACU | | TGTGACACT | |
| | | | | GUUAAG | | GTTAAG | |
| PTPN11 | EXON | − | chr12: 112506930-112506955 | AGUAGUAGU | 2573 | AGTAGTAGT | 3325 |
| | | | | UAUCUCCCUU | | TATCTCCCTT | |
| | | | | CAUCUU | | CATCTT | |
| PTPN11 | EXON | − | chr12: 112506931-112506956 | UAGUAGUAG | 2574 | TAGTAGTAG | 3326 |
| | | | | UUAUCUCCCU | | TTATCTCCCT | |
| | | | | UCAUCU | | TCATCT | |
| PTPN11 | EXON | − | chr12: 112506941-112506966 | GUAGUAGUA | 2575 | GTAGTAGTA | 3327 |
| | | | | GUAGUAGUA | | GTAGTAGTA | |
| | | | | GUUAUCU | | GTTATCT | |
| PTPN11 | EXON | − | chr12: 112506942-112506967 | AGUAGUAGU | 2576 | AGTAGTAGT | 3328 |
| | | | | AGUAGUAGU | | AGTAGTAGT | |
| | | | | AGUUAUC | | AGTTATC | |
| PTPN11 | EXON | − | chr12: 112507028-112507053 | CGAACACUG | 2577 | CGAACACTG | 3329 |
| | | | | AACAAAUCA | | AACAAATCA | |
| | | | | UUCAUCU | | TTCATCT | |
| PTPN11 | EXON | − | chr12: 112507029-112507054 | CCGAACACUG | 2578 | CCGAACACT | 3330 |
| | | | | AACAAAUCA | | GAACAAATC | |
| | | | | UUCAUC | | ATTCATC | |
| PTPN11 | EXON | − | chr12: 112507055-112507080 | GUGUGGGAA | 2579 | GTGTGGGAA | 3331 |
| | | | | AAGAACUUA | | AAGAACTTA | |
| | | | | GACUCGA | | GACTCGA | |
| PTPN11 | EXON | − | chr12: 112507056-112507081 | AGUGUGGGA | 2580 | AGTGTGGGA | 3332 |
| | | | | AAAGAACUU | | AAAGAACTT | |
| | | | | AGACUCG | | AGACTCG | |
| PTPN11 | EXON | − | chr12: 112507109-112507134 | UGGUUGUGA | 2581 | TGGTTGTGA | 3333 |
| | | | | CCGUCUGUU | | CCGTCTGTT | |
| | | | | AGACUAG | | AGACTAG | |
| PTPN11 | EXON | − | chr12: 112507134-112507159 | UAAUAUCCU | 2582 | TAATATCCTT | 3334 |
| | | | | UGGUUUUCC | | GGTTTTCCAT | |
| | | | | AUGGCAC | | GGCAC | |
| PTPN11 | EXON | − | chr12: 112507140-112507165 | UUUUGCUAA | 2583 | TTTTGCTAAT | 3335 |
| | | | | UAUCCUUGG | | ATCCTTGGTT | |
| | | | | UUUUCCA | | TTCCA | |
| PTPN11 | EXON | − | chr12: 112507150-112507175 | CAACUUCUGC | 2584 | CAACTTCTG | 3336 |
| | | | | UUUUGCUAA | | CTTTTGCTAA | |
| | | | | UAUCCU | | TATCCT | |
| PTPN11 | EXON | − | chr12: 112507185-112507210 | UACUGUAAG | 2585 | TACTGTAAG | 3337 |
| | | | | CAGCUUCGGC | | CAGCTTCGG | |
| | | | | UUCCCA | | CTTCCCA | |
| PTPN11 | EXON | − | chr12: 112507195-112507220 | UUGUCCCAGC | 2586 | TTGTCCCAG | 3338 |
| | | | | UACUGUAAG | | CTACTGTAA | |
| | | | | CAGCUU | | GCAGCTT | |
| PTPN11 | EXON | − | chr12: 112507255-112507280 | AGAAAUCAU | 2587 | AGAAATCAT | 3339 |
| | | | | UCAGGAAGC | | TCAGGAAGC | |
| | | | | UUCUUGA | | TTCTTGA | |
| PTPN11 | EXON | − | chr12: 112507269-112507294 | GGCUCAGGG | 2588 | GGCTCAGGG | 3340 |
| | | | | CUAGCAGAA | | CTAGCAGAA | |
| | | | | AUCAUUC | | ATCATTC | |
| PTPN11 | EXON | − | chr12: 112507288-112507313 | AGUGCUGGU | 2589 | AGTGCTGGT | 3341 |
| | | | | UCCAAAAAU | | TCCAAAAAT | |
| | | | | AGGCUCA | | AGGCTCA | |
| PTPN11 | EXON | − | chr12: 112507289-112507314 | AAGUGCUGG | 2590 | AAGTGCTGG | 3342 |
| | | | | UUCCAAAAA | | TTCCAAAAA | |
| | | | | UAGGCUC | | TAGGCTC | |
| PTPN11 | EXON | − | chr12: 112507295-112507320 | UUCCCCAAGU | 2591 | TTCCCCAAG | 3343 |
| | | | | GCUGGUUCC | | TGCTGGTTC | |
| | | | | AAAAAU | | CAAAAAT | |
| PTPN11 | EXON | − | chr12: 112507308-112507333 | UCACAAGAU | 2592 | TCACAAGAT | 3344 |
| | | | | CAGUUUCCCC | | CAGTTTCCC | |
| | | | | AAGUGC | | CAAGTGC | |
| PTPN11 | EXON | − | chr12: 112507377-112507402 | CAAGUCUGG | 2593 | CAAGTCTGG | 3345 |
| | | | | GGAUGCCCCA | | GGATGCCCC | |
| | | | | GUGGGG | | AGTGGGG | |
| PTPN11 | EXON | − | chr12: 112507380-112507405 | UCCCAAGUCU | 2594 | TCCCAAGTC | 3346 |
| | | | | GGGGAUGCC | | TGGGGATGC | |
| | | | | CCAGUG | | CCCAGTG | |
| PTPN11 | EXON | − | chr12: 112507381-112507406 | UUCCCAAGUC | 2595 | TTCCCAAGT | 3347 |
| | | | | UGGGGAUGC | | CTGGGGATG | |
| | | | | CCCAGU | | CCCCAGT | |
| PTPN11 | EXON | − | chr12: 112507382-112507407 | UUUCCCAAG | 2596 | TTTCCCAAG | 3348 |
| | | | | UCUGGGGAU | | TCTGGGGAT | |
| | | | | GCCCCAG | | GCCCCAG | |
| PTPN11 | EXON | − | chr12: 112507394-112507419 | GAAAGAGUC | 2597 | GAAAGAGTC | 3349 |
| | | | | ACGUUUCCCA | | ACGTTTCCC | |
| | | | | AGUCUG | | AAGTCTG | |
| PTPN11 | EXON | − | chr12: 112507395-112507420 | AGAAAGAGU | 2598 | AGAAAGAGT | 3350 |
| | | | | CACGUUUCCC | | CACGTTTCC | |
| | | | | AAGUCU | | CAAGTCT | |
| PTPN11 | EXON | − | chr12: 112507396-112507421 | AAGAAAGAG | 2599 | AAGAAAGAG | 3351 |
| | | | | UCACGUUUCC | | TCACGTTTCC | |
| | | | | CAAGUC | | CAAGTC | |
| PTPN11 | EXON | − | chr12: 112507428-112507453 | UCACUGUGG | 2600 | TCACTGTGG | 3352 |
| | | | | CCUGACUAA | | CCTGACTAA | |
| | | | | AACCCAG | | AACCCAG | |
| PTPN11 | EXON | − | chr12: 112507447-112507472 | CUGUUAGGG | 2601 | CTGTTAGGG | 3353 |
| | | | | CUGUUCCUUC | | CTGTTCCTTC | |
| | | | | UCACUG | | TCACTG | |
| PTPN11 | EXON | − | chr12: 112507466-112507491 | AUUCAACCU | 2602 | ATTCAACCT | 3354 |
| | | | | GGCUGGAGG | | GGCTGGAGG | |
| | | | | CCUGUUA | | CCTGTTA | |
| PTPN11 | EXON | − | chr12: 112507467-112507492 | CAUUCAACCU | 2603 | CATTCAACC | 3355 |
| | | | | GGCUGGAGG | | TGGCTGGAG | |
| | | | | CCUGUU | | GCCTGTT | |
| PTPN11 | EXON | − | chr12: 112507476-112507501 | AAAUGAGCU | 2604 | AAATGAGCT | 3356 |
| | | | | CAUUCAACCU | | CATTCAACC | |
| | | | | GGCUGG | | TGGCTGG | |
| PTPN11 | EXON | − | chr12: 112507479-112507504 | CAAAAAUGA | 2605 | CAAAAATGA | 3357 |
| | | | | GCUCAUUCA | | GCTCATTCA | |
| | | | | ACCUGGC | | ACCTGGC | |
| PTPN11 | EXON | − | chr12: 112507483-112507508 | ACAACAAAA | 2606 | ACAACAAAA | 3358 |
| | | | | AUGAGCUCA | | ATGAGCTCA | |
| | | | | UUCAACC | | TTCAACC | |
| PTPN11 | EXON | − | chr12: 112507513-112507538 | UAGAACAUU | 2607 | TAGAACATT | 3359 |
| | | | | AGCAAAUCU | | AGCAAATCT | |
| | | | | UACUGGU | | TACTGGT | |
| PTPN11 | EXON | − | chr12: 112507517-112507542 | AAUGUAGAA | 2608 | AATGTAGAA | 3360 |
| | | | | CAUUAGCAA | | CATTAGCAA | |
| | | | | AUCUUAC | | ATCTTAC | |
| PTPN11 | EXON | − | chr12: 112507550-112507575 | AGGCAAAGA | 2609 | AGGCAAAGA | 3361 |
| | | | | GGGAUGUCU | | GGGATGTCT | |
| | | | | UUGGAGA | | TTGGAGA | |
| PTPN11 | EXON | − | chr12: 112507556-112507581 | CAUAUGAGG | 2610 | CATATGAGG | 3362 |
| | | | | CAAAGAGGG | | CAAAGAGGG | |
| | | | | AUGUCUU | | ATGTCTT | |
| PTPN11 | EXON | − | chr12: 112507566-112507591 | GAUGAUUCA | 2611 | GATGATTCA | 3363 |
| | | | | ACAUAUGAG | | ACATATGAG | |
| | | | | GCAAAGA | | GCAAAGA | |
| PTPN11 | EXON | − | chr12: 112507567-112507592 | GGAUGAUUC | 2612 | GGATGATTC | 3364 |
| | | | | AACAUAUGA | | AACATATGA | |
| | | | | GGCAAAG | | GGCAAAG | |
| PTPN11 | EXON | − | chr12: 112507575-112507600 | UCCGCACUGG | 2613 | TCCGCACTG | 3365 |
| | | | | AUGAUUCAA | | GATGATTCA | |
| | | | | CAUAUG | | ACATATG | |
| PTPN11 | EXON | − | chr12: 112507593-112507618 | GAUAUUUUC | 2614 | GATATTTTC | 3366 |
| | | | | AUUGAAAUA | | ATTGAAATA | |
| | | | | UCCGCAC | | TCCGCAC | |
| PTPN11 | EXON | − | chr12: 112507664-112507689 | AGAAUCCAA | 2615 | AGAATCCAA | 3367 |
| | | | | GGAGGCCAC | | GGAGGCCAC | |
| | | | | AACUUCA | | AACTTCA | |
| PTPN11 | EXON | − | chr12: 112507678-112507703 | AAGCCAAAG | 2616 | AAGCCAAAG | 3368 |
| | | | | UCAGAAGAA | | TCAGAAGAA | |
| | | | | UCCAAGG | | TCCAAGG | |
| PTPN11 | EXON | − | chr12: 112507681-112507706 | CAGAAGCCA | 2617 | CAGAAGCCA | 3369 |
| | | | | AAGUCAGAA | | AAGTCAGAA | |
| | | | | GAAUCCA | | GAATCCA | |
| PTPN11 | EXON | − | chr12: 112507718-112507743 | AGGAACUAC | 2618 | AGGAACTAC | 3370 |
| | | | | CACCAGGGCU | | CACCAGGGC | |
| | | | | GGAUCU | | TGGATCT | |
| PTPN11 | EXON | − | chr12: 112507725-112507750 | CUCAGAAAG | 2619 | CTCAGAAAG | 3371 |
| | | | | GAACUACCAC | | GAACTACCA | |
| | | | | CAGGGC | | CCAGGGC | |
| PTPN11 | EXON | − | chr12: 112507729-112507754 | AGACCUCAG | 2620 | AGACCTCAG | 3372 |
| | | | | AAAGGAACU | | AAAGGAACT | |
| | | | | ACCACCA | | ACCACCA | |
| PTPN11 | EXON | − | chr12: 112507730-112507755 | GAGACCUCA | 2621 | GAGACCTCA | 3373 |
| | | | | GAAAGGAAC | | GAAAGGAAC | |
| | | | | UACCACC | | TACCACC | |
| PTPN11 | EXON | − | chr12: 112507743-112507768 | CUCAAGGGA | 2622 | CTCAAGGGA | 3374 |
| | | | | CUGAGAGAC | | CTGAGAGAC | |
| | | | | CUCAGAA | | CTCAGAA | |
| PTPN11 | EXON | − | chr12: 112507763-112507788 | CAGCCAAACU | 2623 | CAGCCAAAC | 3375 |
| | | | | ACCCCAAAGU | | TACCCCAAA | |
| | | | | CUCAA | | GTCTCAA | |
| PTPN11 | EXON | − | chr12: 112507764-112507789 | GCAGCCAAAC | 2624 | GCAGCCAAA | 3376 |
| | | | | UACCCCAAAG | | CTACCCCAA | |
| | | | | UCUCA | | AGTCTCA | |
| PTPN11 | EXON | − | chr12: 112507791-112507816 | CUGAUAUAC | 2625 | CTGATATAC | 3377 |
| | | | | AUUUUGUCA | | ATTTTGTCA | |
| | | | | GUGAGAA | | GTGAGAA | |
| PTPN11 | EXON | − | chr12: 112507819-112507844 | AAGGAAUAU | 2626 | AAGGAATAT | 3378 |
| | | | | UGGGGGGUG | | TGGGGGGTG | |
| | | | | GAGGUGG | | GAGGTGG | |
| PTPN11 | EXON | − | chr12: 112507820-112507845 | CAAGGAAUA | 2627 | CAAGGAATA | 3379 |
| | | | | UUGGGGGGU | | TTGGGGGGT | |
| | | | | GGAGGUG | | GGAGGTG | |
| PTPN11 | EXON | − | chr12: 112507821-112507846 | UCAAGGAAU | 2628 | TCAAGGAAT | 3380 |
| | | | | AUUGGGGGG | | ATTGGGGGG | |
| | | | | UGGAGGU | | TGGAGGT | |
| PTPN11 | EXON | − | chr12: 112507822-112507847 | UUCAAGGAA | 2629 | TTCAAGGAA | 3381 |
| | | | | UAUUGGGGG | | TATTGGGGG | |
| | | | | GUGGAGG | | GTGGAGG | |
| PTPN11 | EXON | − | chr12: 112507825-112507850 | AAGUUCAAG | 2630 | AAGTTCAAG | 3382 |
| | | | | GAAUAUUGG | | GAATATTGG | |
| | | | | GGGGUGG | | GGGGTGG | |
| PTPN11 | EXON | − | chr12: 112507828-112507853 | UCAAAGUUC | 2631 | TCAAAGTTC | 3383 |
| | | | | AAGGAAUAU | | AAGGAATAT | |
| | | | | UGGGGGG | | TGGGGGG | |
| PTPN11 | EXON | − | chr12: 112507831-112507856 | AAUUCAAAG | 2632 | AATTCAAAG | 3384 |
| | | | | UUCAAGGAA | | TTCAAGGAA | |
| | | | | UAUUGGG | | TATTGGG | |
| PTPN11 | EXON | − | chr12: 112507832-112507857 | CAAUUCAAA | 2633 | CAATTCAAA | 3385 |
| | | | | GUUCAAGGA | | GTTCAAGGA | |
| | | | | AUAUUGG | | ATATTGG | |
| PTPN11 | EXON | − | chr12: 112507833-112507858 | GCAAUUCAA | 2634 | GCAATTCAA | 3386 |
| | | | | AGUUCAAGG | | AGTTCAAGG | |
| | | | | AAUAUUG | | AATATTG | |
| PTPN11 | EXON | − | chr12: 112507834-112507859 | AGCAAUUCA | 2635 | AGCAATTCA | 3387 |
| | | | | AAGUUCAAG | | AAGTTCAAG | |
| | | | | GAAUAUU | | GAATATT | |
| PTPN11 | EXON | − | chr12: 112507835-112507860 | AAGCAAUUC | 2636 | AAGCAATTC | 3388 |
| | | | | AAAGUUCAA | | AAAGTTCAA | |
| | | | | GGAAUAU | | GGAATAT | |
| PTPN11 | EXON | − | chr12: 112507843-112507868 | GUGUUCUGA | 2637 | GTGTTCTGA | 3389 |
| | | | | AGCAAUUCA | | AGCAATTCA | |
| | | | | AAGUUCA | | AAGTTCA | |
| PTPN11 | EXON | − | chr12: 112507879-112507904 | ACUUCCCUAA | 2638 | ACTTCCCTA | 3390 |
| | | | | UAAGGGAAU | | ATAAGGGAA | |
| | | | | ACCUUC | | TACCTTC | |
| PTPN11 | EXON | − | chr12: 112507891-112507916 | GACAGCAGU | 2639 | GACAGCAGT | 3391 |
| | | | | GACACUUCCC | | GACACTTCC | |
| | | | | UAAUAA | | CTAATAA | |
| PTPN11 | EXON | − | chr12: 112507892-112507917 | AGACAGCAG | 2640 | AGACAGCAG | 3392 |
| | | | | UGACACUUCC | | TGACACTTC | |
| | | | | CUAAUA | | CCTAATA | |
| PTPN11 | EXON | − | chr12: 112507948-112507973 | AAGCUUCUU | 2641 | AAGCTTCTT | 3393 |
| | | | | GCUGCAAAU | | GCTGCAAAT | |
| | | | | ACUGAAC | | ACTGAAC | |
| PTPN11 | EXON | − | chr12: 112508018-112508043 | AAGUCAAGA | 2642 | AAGTCAAGA | 3394 |
| | | | | CAAAACCAA | | CAAAACCAA | |
| | | | | AGCAAAA | | AGCAAAA | |
| PTPN11 | EXON | − | chr12: 112508074-112508099 | UUUGUACAA | 2643 | TTTGTACAA | 3395 |
| | | | | UCAAACUCU | | TCAAACTCT | |
| | | | | UGUGUGC | | TGTGTGC | |
| PTPN11 | EXON | − | chr12: 112508127-112508152 | AUAAAAGCA | 2644 | ATAAAAGCA | 3396 |
| | | | | ACUGAUCUU | | ACTGATCTT | |
| | | | | AAGCAAC | | AAGCAAC | |
| PTPN11 | EXON | − | chr12: 112508171-112508196 | UCUUAUAAC | 2645 | TCTTATAAC | 3397 |
| | | | | AAAACUAGC | | AAAACTAGC | |
| | | | | CAAGAUC | | CAAGATC | |
| PTPN11 | EXON | − | chr12: 112508219-112508244 | CAUGAUAGU | 2646 | CATGATAGT | 3398 |
| | | | | UUGCUGACC | | TTGCTGACC | |
| | | | | UCGUGGA | | TCGTGGA | |
| PTPN11 | EXON | − | chr12: 112508220-112508245 | ACAUGAUAG | 2647 | ACATGATAG | 3399 |
| | | | | UUUGCUGAC | | TTTGCTGAC | |
| | | | | CUCGUGG | | CTCGTGG | |
| PTPN11 | EXON | − | chr12: 112508223-112508248 | AGAACAUGA | 2648 | AGAACATGA | 3400 |
| | | | | UAGUUUGCU | | TAGTTTGCT | |
| | | | | GACCUCG | | GACCTCG | |
| PTPN11 | EXON | − | chr12: 112508265-112508290 | CUAGGGACU | 2649 | CTAGGGACT | 3401 |
| | | | | AUGAUAACU | | ATGATAACT | |
| | | | | CUGGCCU | | CTGGCCT | |
| PTPN11 | EXON | − | chr12: 112508271-112508296 | AGCAACCUA | 2650 | AGCAACCTA | 3402 |
| | | | | GGGACUAUG | | GGGACTATG | |
| | | | | AUAACUC | | ATAACTC | |
| PTPN11 | EXON | − | chr12: 112508287-112508312 | GCACAUGAU | 2651 | GCACATGAT | 3403 |
| | | | | AAGCCGUAG | | AAGCCGTAG | |
| | | | | CAACCUA | | CAACCTA | |
| PTPN11 | EXON | − | chr12: 112508288-112508313 | AGCACAUGA | 2652 | AGCACATGA | 3404 |
| | | | | UAAGCCGUA | | TAAGCCGTA | |
| | | | | GCAACCU | | GCAACCT | |
| PTPN11 | EXON | − | chr12: 112508443-112508468 | CUGACUUCCU | 2653 | CTGACTTCCT | 3405 |
| | | | | CAGAAACCAC | | CAGAAACCA | |
| | | | | CUCUU | | CCTCTT | |
| PTPN11 | EXON | − | chr12: 112508475-112508500 | ACCCAUUACU | 2654 | ACCCATTAC | 3406 |
| | | | | GACUGCUCU | | TGACTGCTC | |
| | | | | GGCCCU | | TGGCCCT | |
| PTPN11 | EXON | − | chr12: 112508476-112508501 | CACCCAUUAC | 2655 | CACCCATTA | 3407 |
| | | | | UGACUGCUC | | CTGACTGCT | |
| | | | | UGGCCC | | CTGGCCC | |
| PTPN11 | EXON | − | chr12: 112508482-112508507 | CUCAUUCACC | 2656 | CTCATTCAC | 3408 |
| | | | | CAUUACUGA | | CCATTACTG | |
| | | | | CUGCUC | | ACTGCTC | |
| PTPN11 | EXON | − | chr12: 112508546-112508571 | UACCCACCAG | 2657 | TACCCACCA | 3409 |
| | | | | CAACCUAGA | | GCAACCTAG | |
| | | | | AGUAGA | | AAGTAGA | |
| PTPN11 | EXON | − | chr12: 112508592-112508617 | UAAUUUUAA | 2658 | TAATTTTAA | 3410 |
| | | | | AAUCCUCAG | | AATCCTCAG | |
| | | | | UGAGCUA | | TGAGCTA | |
| PTPN11 | EXON | − | chr12: 112508692-112508717 | AAAAAGUUA | 2659 | AAAAAGTTA | 3411 |
| | | | | UUAAGACUG | | TTAAGACTG | |
| | | | | UGAAAUU | | TGAAATT | |
| PTPN11 | EXON | − | chr12: 112508748-112508773 | CAUAAGUUU | 2660 | CATAAGTTT | 3412 |
| | | | | CAGAAGGGC | | CAGAAGGGC | |
| | | | | CACACAC | | CACACAC | |
| PTPN11 | EXON | − | chr12: 112508759-112508784 | GGAGAGAUG | 2661 | GGAGAGATG | 3413 |
| | | | | ACCAUAAGU | | ACCATAAGT | |
| | | | | UUCAGAA | | TTCAGAA | |
| PTPN11 | EXON | − | chr12: 112508760-112508785 | GGGAGAGAU | 2662 | GGGAGAGAT | 3414 |
| | | | | GACCAUAAG | | GACCATAAG | |
| | | | | UUUCAGA | | TTTCAGA | |
| PTPN11 | EXON | − | chr12: 112508785-112508810 | CAUUUGAAA | 2663 | CATTTGAAA | 3415 |
| | | | | AGACCUUGG | | AGACCTTGG | |
| | | | | UUUCAGU | | TTTCAGT | |
| PTPN11 | EXON | − | chr12: 112508786-112508811 | ACAUUUGAA | 2664 | ACATTTGAA | 3416 |
| | | | | AAGACCUUG | | AAGACCTTG | |
| | | | | GUUUCAG | | GTTTCAG | |
| PTPN11 | EXON | − | chr12: 112508795-112508820 | CAUUUAGCC | 2665 | CATTTAGCC | 3417 |
| | | | | ACAUUUGAA | | ACATTTGAA | |
| | | | | AAGACCU | | AAGACCT | |
| PTPN11 | EXON | − | chr12: 112508877-112508902 | UCCUGGCUG | 2666 | TCCTGGCTG | 3418 |
| | | | | UUUCCCCGAA | | TTTCCCCGA | |
| | | | | GCAACU | | AGCAACT | |
| PTPN11 | EXON | − | chr12: 112508899-112508924 | CUAAAAAUA | 2667 | CTAAAAATA | 3419 |
| | | | | AUCUUGACC | | ATCTTGACC | |
| | | | | AUUUUCC | | ATTTTCC | |
| PTPN11 | EXON | − | chr12: 112509036-112509061 | AUGUCUAUA | 2668 | ATGTCTATA | 3420 |
| | | | | GUCUAAGUU | | GTCTAAGTT | |
| | | | | UCCCUUA | | TCCCTTA | |
| PTPN11 | EXON | − | chr12: 112509074-112509099 | AACAUACAG | 2669 | AACATACAG | 3421 |
| | | | | AAAACAAAA | | AAAACAAAA | |
| | | | | GCUGCAC | | GCTGCAC | |
| PTPN11 | EXON | − | chr12: 112509139-112509164 | UAACAAAGG | 2670 | TAACAAAGG | 3422 |
| | | | | CAUCCUGACA | | CATCCTGAC | |
| | | | | UCAGGG | | ATCAGGG | |
| PTPN11 | EXON | − | chr12: 112509142-112509167 | UCCUAACAA | 2671 | TCCTAACAA | 3423 |
| | | | | AGGCAUCCU | | AGGCATCCT | |
| | | | | GACAUCA | | GACATCA | |
| PTPN11 | EXON | − | chr12: 112509143-112509168 | AUCCUAACA | 2672 | ATCCTAACA | 3424 |
| | | | | AAGGCAUCC | | AAGGCATCC | |
| | | | | UGACAUC | | TGACATC | |
| PTPN11 | EXON | − | chr12: 112509158-112509183 | UAAGGGCAA | 2673 | TAAGGGCAA | 3425 |
| | | | | AUACAGAUC | | ATACAGATC | |
| | | | | CUAACAA | | CTAACAA | |
| PTPN11 | EXON | − | chr12: 112509180-112509205 | GGAAAAAAG | 2674 | GGAAAAAAG | 3426 |
| | | | | AUUUCAACA | | ATTTCAACA | |
| | | | | AAAUUAA | | AAATTAA | |
| PTPN11 | EXON | − | chr12: 112509181-112509206 | AGGAAAAAA | 2675 | AGGAAAAAA | 3427 |
| | | | | GAUUUCAAC | | GATTTCAAC | |
| | | | | AAAAUUA | | AAAATTA | |
| PTPN11 | EXON | − | chr12: 112509206-112509231 | AUUUUGGAA | 2676 | ATTTTGGAA | 3428 |
| | | | | CUUUUCAAG | | CTTTTCAAG | |
| | | | | AGGAAGA | | AGGAAGA | |
| PTPN11 | EXON | − | chr12: 112509213-112509238 | AAACUAUAU | 2677 | AAACTATAT | 3429 |
| | | | | UUUGGAACU | | TTTGGAACT | |
| | | | | UUUCAAG | | TTTCAAG | |
| PTPN11 | EXON | − | chr12: 112509227-112509252 | AUGAAAGAU | 2678 | ATGAAAGAT | 3430 |
| | | | | ACAAUAAAC | | ACAATAAAC | |
| | | | | UAUAUUU | | TATATTT | |
| PTPN11 | EXON | − | chr12: 112509270-112509295 | UUGUGUGAA | 2679 | TTGTGTGAA | 3431 |
| | | | | CUGCCCAUAG | | CTGCCCATA | |
| | | | | UGAAAA | | GTGAAAA | |
| PTPN11 | EXON | − | chr12: 112509377-112509402 | UUAUUAAUU | 2680 | TTATTAATTA | 3432 |
| | | | | ACAUGAUUU | | CATGATTTG | |
| | | | | GAGGCUU | | AGGCTT | |
| PTPN11 | EXON | − | chr12: 112509383-112509408 | GGCAAAUUA | 2681 | GGCAAATTA | 3433 |
| | | | | UUAAUUACA | | TTAATTACA | |
| | | | | UGAUUUG | | TGATTTG | |
| PTPN11 | EXON | − | chr12: 112509409-112509434 | AAUCACAAU | 2682 | AATCACAAT | 3434 |
| | | | | UAGGUCAUA | | TAGGTCATA | |
| | | | | AAUAAAC | | AATAAAC | |
| PTPN11 | EXON | − | chr12: 112509424-112509449 | UUUUAUUAA | 2683 | TTTTATTAAT | 3435 |
| | | | | UAAAAGAAU | | AAAAGAATC | |
| | | | | CACAAUU | | ACAATT | |
| PTPN11 | EXON | − | chr12: 112509469-112509494 | GUAGGUCUA | 2684 | GTAGGTCTA | 3436 |
| | | | | GUCAUCAGC | | GTCATCAGC | |
| | | | | UUAAUCA | | TTAATCA | |
| PTPN11 | EXON | − | chr12: 112509470-112509495 | UGUAGGUCU | 2685 | TGTAGGTCT | 3437 |
| | | | | AGUCAUCAG | | AGTCATCAG | |
| | | | | CUUAAUC | | CTTAATC | |
| PTPN11 | EXON | − | chr12: 112509492-112509517 | CAUAUACUG | 2686 | CATATACTG | 3438 |
| | | | | CAGGAAAAU | | CAGGAAAAT | |
| | | | | UAAUUGU | | TAATTGT | |
| PTPN11 | EXON | − | chr12: 112509507-112509532 | UCUGGUACA | 2687 | TCTGGTACA | 3439 |
| | | | | AUACUUCAU | | ATACTTCAT | |
| | | | | AUACUGC | | ATACTGC | |
| PTPN11 | EXON | − | chr12: 112509530-112509555 | AAAUAUUAC | 2688 | AAATATTAC | 3440 |
| | | | | AUAUCUUUU | | ATATCTTTTA | |
| | | | | AAUACUC | | ATACTC | |
| PTPN11 | EXON | − | chr12: 112509573-112509598 | ACAUCCUAA | 2689 | ACATCCTAA | 3441 |
| | | | | AACGUAUUC | | AACGTATTC | |
| | | | | CUUUUAA | | CTTTTAA | |
| PTPN11 | EXON | − | chr12: 112509683-112509708 | GACUACAUA | 2690 | GACTACATA | 3442 |
| | | | | AUAUACGUG | | ATATACGTG | |
| | | | | GGCAAAA | | GGCAAAA | |
| PTPN11 | EXON | − | chr12: 112509691-112509716 | UGCAAAUAG | 2691 | TGCAAATAG | 3443 |
| | | | | ACUACAUAA | | ACTACATAA | |
| | | | | UAUACGU | | TATACGT | |
| PTPN11 | EXON | − | chr12: 112509692-112509717 | UUGCAAAUA | 2692 | TTGCAAATA | 3444 |
| | | | | GACUACAUA | | GACTACATA | |
| | | | | AUAUACG | | ATATACG | |
| PTPN11 | EXON | − | chr12: 112509788-112509813 | GCGCUAACAC | 2693 | GCGCTAACA | 3445 |
| | | | | CCAUAAAUA | | CCCATAAAT | |
| | | | | UAGGUG | | ATAGGTG | |
| PTPN11 | EXON | − | chr12: 112509789-112509814 | UGCGCUAAC | 2694 | TGCGCTAAC | 3446 |
| | | | | ACCCAUAAA | | ACCCATAAA | |
| | | | | UAUAGGU | | TATAGGT | |
| PTPN11 | EXON | − | chr12: 112509790-112509815 | UUGCGCUAA | 2695 | TTGCGCTAA | 3447 |
| | | | | CACCCAUAAA | | CACCCATAA | |
| | | | | UAUAGG | | ATATAGG | |
| PTPN11 | EXON | − | chr12: 112509793-112509818 | CAGUUGCGC | 2696 | CAGTTGCGC | 3448 |
| | | | | UAACACCCAU | | TAACACCCA | |
| | | | | AAAUAU | | TAAATAT | |
| PTPN11 | EXON | − | chr12: 112509900-112509925 | CGACAAAUG | 2697 | CGACAAATG | 3449 |
| | | | | CCAUCAUAU | | CCATCATAT | |
| | | | | AAGAAAA | | AAGAAAA | |

[0343] gRNA molecule scaffolds for use in connection with particular Cas molecules are known in the art. Exemplary gRNA molecules, particularly useful in combination with an s. pyogenes Cas9 molecule, include, e.g., dgRNA molecule comprising, e.g., consisting of, a first nucleic acid sequence having the sequence of:

[0344] nnnnnnnnnnnnnnnnnnnnGUUUUAGAGCUAUGCUGUUUUG (SEQ ID NO: 47),

[0345] where the “n”s refer to the residues of the targeting domain, e.g., as described herein, and may consist of 15-25 nucleotides, e.g., consists of 20 nucleotides; and a second nucleic acid sequence having the exemplary sequence of: AACUUACCAAGGAACAGCAUAGCAAGUUAAAAUAAGGCUAGUCCGUUAUCAA CUUGAAAAAGUGGCACCGAGUCGGUGC, optionally with 1, 2, 3, 4, 5, 6, or 7 (e.g., 4 or 7, e.g., 7) additional U nucleotides at the 3′ end (SEQ ID NO: 48).

[0346] The second nucleic acid molecule may alternatively consist of a fragment of the sequence above, wherein such fragment is capable of hybridizing to the first nucleic acid. An example of such second nucleic acid molecule is:

[0347] AACAGCAUAGCAAGUUAAAAUAAGGCUAGUCCGUUAUCAACUUGAAA AAGUGGCACCGAGUCGGUGC, optionally with 1, 2, 3, 4, 5, 6, or 7 (e.g., 4 or 7, e.g., 7) additional U nucleotides at the 3′ end (SEQ ID NO: 49).

[0348] Another exemplary gRNA molecule, e.g., a sgRNA molecule, particularly for use with an S. pyogenes Cas9 molecule, comprises, e.g., consists of a first nucleic acid having the sequence:

[0349] nnnnnnnnnnnnnnnnnnnGUUUUAGAGCUAGAAAUAGCAAGUUAAAAUAAGG CUAGUCCGUUAUCAACUUGAAAAAGUGGCACCGAGUCGGUGC (SEQ ID NO: 50), where the “n”s refer to the residues of the targeting domain, e.g., as described herein, and may consist of 15-25 nucleotides, e.g., consist of 20 nucleotides, optionally with 1, 2, 3, 4, 5, 6, or 7 (e.g., 4 or 7, e.g., 4) additional U nucleotides at the 3′ end.

### TALEN Gene Editing Systems

[0350] TALENs are produced artificially by fusing a TAL effector DNA binding domain to a DNA cleavage domain. Transcription activator-like effects (TALEs) can be engineered to bind any desired DNA sequence, including a portion of the HLA or TCR gene. By combining an engineered TALE with a DNA cleavage domain, a restriction enzyme can be produced which is specific to any desired DNA sequence, including a HLA or TCR sequence. These can then be introduced into a cell, wherein they can be used for genome editing. Boch (2011) Nature Biotech. 29: 135-6; and Boch et al. (2009) Science 326: 1509-12; Moscou et al. (2009) Science 326: 3501.

[0351] TALEs are proteins secreted by Xanthomonas bacteria. The DNA binding domain contains a repeated, highly conserved 33-34 amino acid sequence, with the exception of the 12th and 13th amino acids. These two positions are highly variable, showing a strong correlation with specific nucleotide recognition. They can thus be engineered to bind to a desired DNA sequence.

[0352] To produce a TALEN, a TALE protein is fused to a nuclease (N), which is, for example, a wild-type or mutated Fold endonuclease. Several mutations to FokI have been made for its use in TALENs; these, for example, improve cleavage specificity or activity. Cermak et al. (2011) Nucl. Acids Res. 39: e82; Miller et al. (2011) Nature Biotech. 29: 143-8; Hockemeyer et al. (2011) Nature Biotech. 29: 731-734; Wood et al. (2011) Science 333: 307; Doyon et al. (2010) Nature Methods 8: 74-79; Szczepek et al. (2007) Nature Biotech. 25: 786-793; and Guo et al. (2010) J. Mol. Biol. 200: 96.

[0353] The FokI domain functions as a dimer, requiring two constructs with unique DNA binding domains for sites in the target genome with proper orientation and spacing. Both the number of amino acid residues between the TALE DNA binding domain and the FokI cleavage domain and the number of bases between the two individual TALEN binding sites appear to be important parameters for achieving high levels of activity. Miller et al. (2011) Nature Biotech. 29: 143-8.

[0354] A TALEN specific for a gene encoding SHP1 or SHP2, can be used inside a cell to produce a double-stranded break (DSB). A mutation can be introduced at the break site if the repair mechanisms improperly repair the break via non-homologous end joining. For example, improper repair may introduce a frame shift mutation.

[0355] TALENs specific to sequences in a gene encoding SHP1 or SHP2 can be constructed using any method known in the art, including various schemes using modular components. Zhang et al. (2011) Nature Biotech. 29: 149-53; Geibler et al. (2011) PLoS ONE 6: e19509; U.S. Pat. Nos. 8,420,782; 8,470,973, the contents of which are hereby incorporated by reference in their entirety.

### Zinc Finger Nucleases

[0356] “ZFN” or “Zinc Finger Nuclease” refers to a zinc finger nuclease, an artificial nuclease which can be used to modify, e.g., delete one or more nucleic acids of, a desired nucleic acid sequence, e.g., a gene encoding SHP1 or SHP2.

[0357] Like a TALEN, a ZFN comprises a Fold nuclease domain (or derivative thereof) fused to a DNA-binding domain. In the case of a ZFN, the DNA-binding domain comprises one or more zinc fingers. Carroll et al. (2011) Genetics Society of America 188: 773-782; and Kim et al. (1996) Proc. Natl. Acad. Sci. USA 93: 1156-1160.

[0358] A zinc finger is a small protein structural motif stabilized by one or more zinc ions. A zinc finger can comprise, for example, Cys2His2, and can recognize an approximately 3-bp sequence. Various zinc fingers of known specificity can be combined to produce multi-finger polypeptides which recognize about 6, 9, 12, 15 or 18-bp sequences. Various selection and modular assembly techniques are available to generate zinc fingers (and combinations thereof) recognizing specific sequences, including phage display, yeast one-hybrid systems, bacterial one-hybrid and two-hybrid systems, and mammalian cells.

[0359] Like a TALEN, a ZFN must dimerize to cleave DNA. Thus, a pair of ZFNs are required to target non-palindromic DNA sites. The two individual ZFNs must bind opposite strands of the DNA with their nucleases properly spaced apart. Bitinaite et al. (1998) Proc. Natl. Acad. Sci. USA 95: 10570-5.

[0360] Also like a TALEN, a ZFN can create a double-stranded break in the DNA, which can create a frame-shift mutation if improperly repaired, leading to a decrease in the expression of a gene encoding SHP1 or SHP2, in a cell. ZFNs can also be used with homologous recombination to mutate a gene encoding SHP1 or SHP2.

[0361] ZFNs specific to sequences in a gene encoding SHP1 or SHP2 can be constructed using any method known in the art. See, e.g., Provasi (2011) Nature Med. 18: 807-815; Torikai (2013) Blood 122: 1341-1349; Cathomen et al. (2008) Mol. Ther. 16: 1200-7; and Guo et al. (2010) J. Mol. Biol. 400: 96; U.S. Patent Publication 2011/0158957; and U.S. Patent Publication 2012/0060230, the contents of which are hereby incorporated by reference in their entirety. In embodiments, The ZFN gene editing system may also comprise nucleic acid encoding one or more components of the ZFN gene editing system, e.g., a ZFN gene editing system targeted to a gene encoding SHP1 or SHP2.

Double-Stranded RNA, e.g., siRNA or shRNA, targeting SHP1 or SHP2

[0362] According to the present invention, double stranded RNA (“dsRNA”), e.g., siRNA or shRNA can be used to decrease the expression of SHP1 or SHP2. Also contemplated by the present invention are the uses of a nucleic acid encoding said dsRNA inhibitors of a gene encoding SHP1 or SHP2.

[0363] In an embodiment, the SHP inhibitor is a nucleic acid, e.g., a dsRNA, e.g., a siRNA or shRNA specific for a nucleic acid encoding SHP1 or SHP2.

[0364] An aspect of the invention provides a composition comprising a dsRNA, e.g., a siRNA or shRNA, comprising at least 15 contiguous nucleotides, e.g., 15, 16, 17, 18, 19, 20, 21, 22, 23, 24 or 25 contiguous nucleotides, e.g., 21 contiguous nucleotides. It is understood that some of the target sequences and/or shRNA molecules are presented as DNA, but the dsRNA agents targeting these sequences or comprising these sequences can be RNA, or any nucleotide, modified nucleotide or substitute disclosed herein and/or known in the art, provided that the molecule can still mediate RNA interference.

[0365] In embodiments, the SHP inhibitor is a nucleic acid, e.g., DNA, encoding a dsRNA inhibitor, e.g., shRNA or siRNA, of any of the above embodiments. In embodiments, the nucleic acid, e.g., DNA, is disposed on a vector, e.g., any conventional expression system, e.g., as described herein, e.g., a lentiviral vector.

### CAR Molecules

[0366] In one aspect, the antigen binding domain of a CAR described herein is a scFv antibody fragment. In one aspect, such antibody fragments are functional in that they retain the equivalent binding affinity, e.g., they bind the same antigen with comparable affinity, as the IgG antibody from which it is derived. In other embodiments, the antibody fragment has a lower binding affinity, e.g., it binds the same antigen with a lower binding affinity than the antibody from which it is derived, but is functional in that it provides a biological response described herein. In one embodiment, the CAR molecule comprises an antibody fragment that has a binding affinity KD of 10⁻⁴ M to 10⁻⁸ M, e.g., 10⁻⁵ M to 10⁻⁷ M, e.g., 10⁻⁶ M or 10⁻⁷ M, for the target antigen. In one embodiment, the antibody fragment has a binding affinity that is at least five-fold, 10-fold, 20-fold, 30-fold, 50-fold, 100-fold or 1,000-fold less than a reference antibody, e.g., an antibody described herein.

[0367] In one aspect such antibody fragments are functional in that they provide a biological response that can include, but is not limited to, activation of an immune response, inhibition of signal-transduction origination from its target antigen, inhibition of kinase activity, and the like, as will be understood by a skilled artisan.

[0368] In one aspect, the antigen binding domain of the CAR is a scFv antibody fragment that is humanized compared to the murine sequence of the scFv from which it is derived.

[0369] In one aspect, the antigen binding domain of a CAR of the invention (e.g., a scFv) is encoded by a nucleic acid molecule whose sequence has been codon optimized for expression in a mammalian cell. In one aspect, entire CAR construct of the invention is encoded by a nucleic acid molecule whose entire sequence has been codon optimized for expression in a mammalian cell. Codon optimization refers to the discovery that the frequency of occurrence of synonymous codons (i.e., codons that code for the same amino acid) in coding DNA is biased in different species. Such codon degeneracy allows an identical polypeptide to be encoded by a variety of nucleotide sequences. A variety of codon optimization methods is known in the art, and include, e.g., methods disclosed in at least U.S. Pat. Nos. 5,786,464 and 6,114,148.

[0370] In one aspect, the CARs of the invention combine an antigen binding domain of a specific antibody with an intracellular signaling molecule. For example, in some aspects, the intracellular signaling molecule includes, but is not limited to, CD3-zeta chain, 4-1BB and CD28 signaling modules, a functional variant thereof, and combinations thereof. In one aspect, the antigen binding domain binds to a tumor antigen as described herein.

[0371] Furthermore, the present invention provides CARs and CAR-expressing cells and their use in medicaments or methods for treating, among other diseases, cancer or any malignancy or autoimmune diseases involving cells or tissues which express a tumor antigen as described herein.

[0372] In one aspect, the CAR of the invention can be used to eradicate a normal cell that express a tumor antigen as described herein, thereby applicable for use as a cellular conditioning therapy prior to cell transplantation. In one aspect, the normal cell that expresses a tumor antigen as described herein is a normal stem cell and the cell transplantation is a stem cell transplantation.

[0373] In one aspect, the invention provides an immune effector cell (e.g., T cell, NK cell) engineered to express a chimeric antigen receptor (CAR), wherein the engineered immune effector cell exhibits an antitumor property. A preferred antigen is a cancer associated antigen (i.e., tumor antigen) described herein. In one aspect, the antigen binding domain of the CAR comprises a partially humanized antibody fragment. In one aspect, the antigen binding domain of the CAR comprises a partially humanized scFv. Accordingly, the invention provides CARs that comprises a humanized antigen binding domain and is engineered into a cell, e.g., a T cell or a NK cell, and methods of their use for adoptive therapy.

[0374] In one aspect, the CARs of the invention comprise at least one intracellular domain selected from the group of a CD137 (4-1BB) signaling domain, a CD28 signaling domain, a CD27 signal domain, a CD3zeta signal domain, a functional variant thereof, and any combination thereof. In one aspect, the CARs of the invention comprise at least one intracellular signaling domain is from one or more costimulatory molecule(s) other than a CD137 (4-1BB) or CD28.

[0375] Sequences of some examples of various components of CARs of the instant invention is listed in Table 1, where aa stands for amino acids, and na stands for nucleic acids that encode the corresponding peptide.

TABLE 1
Sequences of various components of CAR (aa—amino acids, na—nucleic acids
that encodes the corresponding protein)

| SEQ | | |
|---|---|---|
| ID | | |
| NO | description | Sequence |
| 400 | EF-1 | CGTGAGGCTCCGGTGCCCGTCAGTGGGCAGAGCGCACATCGCCC |
| | promoter | ACAGTCCCCGAGAAGTTGGGGGGAGGGGTCGGCAATTGAACCGG |
| | | TGCCTAGAGAAGGTGGCGCGGGGTAAACTGGGAAAGTGATGTCG |
| | | TGTACTGGCTCCGCCTTTTTCCCGAGGGTGGGGGAGAACCGTATA |
| | | TAAGTGCAGTAGTCGCCGTGAACGTTCTTTTTCGCAACGGGTTTG |
| | | CCGCCAGAACACAGGTAAGTGCCGTGTGTGGTTCCCGCGGGCCTG |
| | | GCCTCTTTACGGGTTATGGCCCTTGCGTGCCTTGAATTACTTCCAC |
| | | CTGGCTGCAGTACGTGATTCTTGATCCCGAGCTTCGGGTTGGAAG |
| | | TGGGTGGGAGAGTTCGAGGCCTTGCGCTTAAGGAGCCCCTTCGCC |
| | | TCGTGCTTGAGTTGAGGCCTGGCCTGGGCGCTGGGGCCGCCGCGT |
| | | GCGAATCTGGTGGCACCTTCGCGCCTGTCTCGCTGCTTTCGATAA |
| | | GTCTCTAGCCATTTAAAATTTTTGATGACCTGCTGCGACGCTTTTT |
| | | TTCTGGCAAGATAGTCTTGTAAATGCGGGCCAAGATCTGCACACT |
| | | GGTATTTCGGTTTTTGGGGCCGCGGGCGGCGACGGGGCCCGTGCG |
| | | TCCCAGCGCACATGTTCGGCGAGGCGGGGCCTGCGAGCGCGGCC |
| | | ACCGAGAATCGGACGGGGGTAGTCTCAAGCTGGCCGGCCTGCTCT |
| | | GGTGCCTGGCCTCGCGCCGCCGTGTATCGCCCCGCCCTGGGCGGC |
| | | AAGGCTGGCCCGGTCGGCACCAGTTGCGTGAGCGGAAAGATGGC |
| | | CGCTTCCCGGCCCTGCTGCAGGGAGCTCAAAATGGAGGACGCGG |
| | | CGCTCGGGAGAGCGGGCGGGTGAGTCACCCACACAAAGGAAAAG |
| | | GGCCTTTCCGTCCTCAGCCGTCGCTTCATGTGACTCCACGGAGTA |
| | | CCGGGCGCCGTCCAGGCACCTCGATTAGTTCTCGAGCTTTTGGAG |
| | | TACGTCGTCTTTAGGTTGGGGGGAGGGGTTTTATGCGATGGAGTT |
| | | TCCCCACACTGAGTGGGTGGAGACTGAAGTTAGGCCAGCTTGGCA |
| | | CTTGATGTAATTCTCCTTGGAATTTGCCCTTTTTGAGTTTGGATCT |
| | | TGGTTCATTCTCAAGCCTCAGACAGTGGTTCAAAGTTTTTTTCTTC |
| | | CATTTCAGGTGTCGTGA |
| 401 | Leader (aa) | MALPVTALLLPLALLLHAARP |
| 402 | Leader (na) | ATGGCCCTGCCTGTGACAGCCCTGCTGCTGCCTCTGGCTCTGCTGC |
| | | TGCATGCCGCTAGACCC |
| 403 | CD 8 hinge | TTTPAPRPPTPAPTIASQPLSLRPEACRPAAGGAVHTRGLDFACD |
| | (aa) | |
| 404 | CD8 hinge | ACCACGACGCCAGCGCCGCGACCACCAACACCGGCGCCCACCAT |
| | (na) | CGCGTCGCAGCCCCTGTCCCTGCGCCCAGAGGCGTGCCGGCCAGC |
| | | GGCGGGGGGCGCAGTGCACACGAGGGGGCTGGACTTCGCCTGTG |
| | | AT |
| 405 | Ig4 hinge (aa) | ESKYGPPCPPCPAPEFLGGPSVFLFPPKPKDTLMISRTPEVTCVVVDV |
| | | SQEDPEVQFNWYVDGVEVHNAKTKPREEQFNSTYRVVSVLTVLHQ |
| | | DWLNGKEYKCKVSNKGLPSSIEKTISKAKGQPREPQVYTLPPSQEEM |
| | | TKNQVSLTCLVKGFYPSDIAVEWESNGQPENNYKTTPPVLDSDGSFF |
| | | LYSRLTVDKSRWQEGNVFSCSVMHEALHNHYTQKSLSLSLGKM |
| 406 | Ig4 hinge | GAGAGCAAGTACGGCCCTCCCTGCCCCCCTTGCCCTGCCCCCGAG |
| | (na) | TTCCTGGGCGGACCCAGCGTGTTCCTGTTCCCCCCCAAGCCCAAG |
| | | GACACCCTGATGATCAGCCGGACCCCCGAGGTGACCTGTGTGGTG |
| | | GTGGACGTGTCCCAGGAGGACCCCGAGGTCCAGTTCAACTGGTAC |
| | | GTGGACGGCGTGGAGGTGCACAACGCCAAGACCAAGCCCCGGGA |
| | | GGAGCAGTTCAATAGCACCTACCGGGTGGTGTCCGTGCTGACCGT |
| | | GCTGCACCAGGACTGGCTGAACGGCAAGGAATACAAGTGTAAGG |
| | | TGTCCAACAAGGGCCTGCCCAGCAGCATCGAGAAAACCATCAGC |
| | | AAGGCCAAGGGCCAGCCTCGGGAGCCCCAGGTGTACACCCTGCC |
| | | CCCTAGCCAAGAGGAGATGACCAAGAACCAGGTGTCCCTGACCT |
| | | GCCTGGTGAAGGGCTTCTACCCCAGCGACATCGCCGTGGAGTGGG |
| | | AGAGCAACGGCCAGCCCGAGAACAACTACAAGACCACCCCCCCT |
| | | GTGCTGGACAGCGACGGCAGCTTCTTCCTGTACAGCCGGCTGACC |
| | | GTGGACAAGAGCCGGTGGCAGGAGGGCAACGTCTTTAGCTGCTC |
| | | CGTGATGCACGAGGCCCTGCACAACCACTACACCCAGAAGAGCC |
| | | TGAGCCTGTCCCTGGGCAAGATG |
| 407 | IgD hinge | RWPESPKAQASSVPTAQPQAEGSLAKATTAPATTRNTGRGGEEKKK |
| | (aa) | EKEKEEQEERETKTPECPSHTQPLGVYLLTPAVQDLWLRDKATFTCF |
| | | VVGSDLKDAHLTWEVAGKVPTGGVEEGLLERHSNGSQSQHSRLTLP |
| | | RSLWNAGTSVTCTLNHPSLPPQRLMALREPAAQAPVKLSLNLLASSD |
| | | PPEAASWLLCEVSGFSPPNILLMWLEDQREVNTSGFAPARPPPQPGST |
| | | TFWAWSVLRVPAPPSPQPATYTCVVSHEDSRTLLNASRSLEVSYVTDH |
| 408 | IgD hinge | AGGTGGCCCGAAAGTCCCAAGGCCCAGGCATCTAGTGTTCCTACT |
| | (na) | GCACAGCCCCAGGCAGAAGGCAGCCTAGCCAAAGCTACTACTGC |
| | | ACCTGCCACTACGCGCAATACTGGCCGTGGCGGGGAGGAGAAGA |
| | | AAAAGGAGAAAGAGAAAGAAGAACAGGAAGAGAGGGAGACCAA |
| | | GACCCCTGAATGTCCATCCCATACCCAGCCGCTGGGCGTCTATCT |
| | | CTTGACTCCCGCAGTACAGGACTTGTGGCTTAGAGATAAGGCCAC |
| | | CTTTACATGTTTCGTCGTGGGCTCTGACCTGAAGGATGCCCATTTG |
| | | ACTTGGGAGGTTGCCGGAAAGGTACCCACAGGGGGGGTTGAGGA |
| | | AGGGTTGCTGGAGCGCCATTCCAATGGCTCTCAGAGCCAGCACTC |
| | | AAGACTCACCCTTCCGAGATCCCTGTGGAACGCCGGGACCTCTGT |
| | | CACATGTACTCTAAATCATCCTAGCCTGCCCCCACAGCGTCTGAT |
| | | GGCCCTTAGAGAGCCAGCCGCCCAGGCACCAGTTAAGCTTAGCCT |
| | | GAATCTGCTCGCCAGTAGTGATCCCCCAGAGGCCGCCAGCTGGCT |
| | | CTTATGCGAAGTGTCCGGCTTTAGCCCGCCCAACATCTTGCTCAT |
| | | GTGGCTGGAGGACCAGCGAGAAGTGAACACCAGCGGCTTCGCTC |
| | | CAGCCCGGCCCCCACCCCAGCCGGGTTCTACCACATTCTGGGCCT |
| | | GGAGTGTCTTAAGGGTCCCAGCACCACCTAGCCCCCAGCCAGCCA |
| | | CATACACCTGTGTTGTGTCCCATGAAGATAGCAGGACCCTGCTAA |
| | | ATGCTTCTAGGAGTCTGGAGGTTTCCTACGTGACTGACCATT |
| 10 | GS | GGGGSGGGGS |
| | hinge/linker | |
| | (aa) | |
| 11 | GS | GGTGGCGGAGGTTCTGGAGGTGGAGGTTCC |
| | hinge/linker | |
| | (na) | |
| 12 | CD8TM (aa) | IYIWAPLAGTCGVLLLSLVITLYC |
| 13 | CD8 TM (na) | ATCTACATCTGGGCGCCCTTGGCCGGGACTTGTGGGGTCCTTCTC |
| | | CTGTCACTGGTTATCACCCTTTACTGC |
| 14 | 4-1BB | KRGRKKLLYIFKQPFMRPVQTTQEEDGCSCRFPEEEEGGCEL |
| | intracellular | |
| | domain (aa) | |
| 15 | 4-1BB | AAACGGGGCAGAAAGAAACTCCTGTATATATTCAAACAACCATTT |
| | intracellular | ATGAGACCAGTACAAACTACTCAAGAGGAAGATGGCTGTAGCTG |
| | domain (na) | CCGATTTCCAGAAGAAGAAGAAGGAGGATGTGAACTG |
| 16 | CD27 (aa) | QRRKYRSNKGESPVEPAEPCRYSCPREEEGSTIPIQEDYRKPEPACSP |
| 17 | CD27 (na) | AGGAGTAAGAGGAGCAGGCTCCTGCACAGTGACTACATGAACAT |
| | | GACTCCCCGCCGCCCCGGGCCCACCCGCAAGCATTACCAGCCCTA |
| | | TGCCCCACCACGCGACTTCGCAGCCTATCGCTCC |
| 18 | CD3-zeta | RVKFSRSADAPAYKQGQNQLYNELNLGRREEYDVLDKRRGRDPEM |
| | (aa) | GGKPRRKNPQEGLYNELQKDKMAEAYSEIGMKGERRRGKGHDGLY |
| | | QGLSTATKDTYDALHMQALPPR |
| 19 | CD3-zeta | AGAGTGAAGTTCAGCAGGAGCGCAGACGCCCCCGCGTACAAGCA |
| | (na) | GGGCCAGAACCAGCTCTATAACGAGCTCAATCTAGGACGAAGAG |
| | | AGGAGTACGATGTTTTGGACAAGAGACGTGGCCGGGACCCTGAG |
| | | ATGGGGGGAAAGCCGAGAAGGAAGAACCCTCAGGAAGGCCTGTA |
| | | CAATGAACTGCAGAAAGATAAGATGGCGGAGGCCTACAGTGAGA |
| | | TTGGGATGAAAGGCGAGCGCCGGAGGGGCAAGGGGCACGATGGC |
| | | CTTTACCAGGGTCTCAGTACAGCCACCAAGGACACCTACGACGCC |
| | | CTTCACATGCAGGCCCTGCCCCCTCGC |
| 20 | CD3-zeta | RVKFSRSADAPAYQQGQNQLYNELNLGRREEYDVLDKRRGRDPEM |
| | (aa) | GGKPRRKNPQEGLYNELQKDKMAEAYSEIGMKGERRRGKGHDGLY |
| | | QGLSTATKDTYDALHMQALPPR |
| 21 | CD3-zeta | AGAGTGAAGTTCAGCAGGAGCGCAGACGCCCCCGCGTACCAGCA |
| | (na) | GGGCCAG |
| | | AACCAGCTCTATAACGAGCTCAATCTAGGACGAAGAGAGGAGTA |
| | | CGATGTTT |
| | | TGGACAAGAGACGTGGCCGGGACCCTGAGATGGGGGGAAAGCCG |
| | | AGAAGGA |
| | | AGAACCCTCAGGAAGGCCTGTACAATGAACTGCAGAAAGATAAG |
| | | ATGGCGG |
| | | AGGCCTACAGTGAGATTGGGATGAAAGGCGAGCGCCGGAGGGGC |
| | | AAGGGGC |
| | | ACGATGGCCTTTACCAGGGTCTCAGTACAGCCACCAAGGACACCT |
| | | ACGACGC |
| | | CCTTCACATGCAGGCCCTGCCCCCTCGC |
| 22 | linker | GGGGS |
| 23 | linker | GGTGGCGGAGGTTCTGGAGGTGGAGGTTCC |
| 24 | PD-1 | Pgwfldspdrpwnpptfspallvvtegdnatftcsfsntsesfvlnwyrmspsnqtdklaafpedrsqpg |
| | extracellular | qdcrfrvtqlpngrdfhmsvvrarrndsgtylcgaislapkaqikeslraelrvterraevptahpspsprpa |
| | domain (aa) | gqfqtlv |
| 25 | PD-1 | Cccggatggtttctggactctccggatcgcccgtggaatcccccaaccttctcaccggcactcttggttgtgac |
| | extracellular | tgagggcgataatgcgaccttcacgtgctcgttctccaacacctccgaatcattcgtgctgaactggtaccgca |
| | domain (na) | tgagcccgtcaaaccagaccgacaagctcgccgcgtttccggaagatcggtcgcaaccgggacaggattgt |
| | | cggttccgcgtgactcaactgccgaatggcagagacttccacatgagcgtggtccgcgctaggcgaaacga |
| | | ctccgggacctacctgtgcggagccatctcgctggcgcctaaggcccaaatcaaagagagcttgagggccg |
| | | aactgagagtgaccgagcgcagagctgaggtgccaactgcacatccatccccatcgcctcggcctgcggg |
| | | gcagtttcagaccctggtc |
| 26 | PD-1 CAR | Malpvtalllplalllhaarppgwfldspdrpwnpptfspallvvtegdnatftcsfsntsesfvlnwyrms |
| | (aa) with | psnqtdklaafpedrsqpgqdcrfrvtqlpngrdfhmsvvrarrndsgtylcgaislapkaqikeslraelr |
| | signal | vterraevptahpspsprpagqfqtlvtttpaprpptpaptiasqplslrpeacrpaaggavhtrgldfacdiy |
| | | iwaplagtcgvlllslvitlyckrgrkkllyifkqpfmrpvqttqeedgcscrfpeeeeggcelrvkfsrsad |
| | | apaykqgqnqlynelnlgrreeydvldkrrgrdpemggkprrknpqeglynelqkdkmaeayseigm |
| | | kgerrrgkghdglyqglstatkdtydalhmqalppr |
| 27 | PD-1 CAR | Atggccctccctgtcactgccctgcttctccccctcgcactcctgctccacgccgctagaccacccggatggt |
| | (na) | ttctggactctccggatcgcccgtggaatcccccaaccttctcaccggcactcttggttgtgactgagggcgat |
| | | aatgcgaccttcacgtgctcgttctccaacacctccgaatcattcgtgctgaactggtaccgcatgagcccgtc |
| | | aaaccagaccgacaagctcgccgcgtttccggaagatcggtcgcaaccgggacaggattgtcggttccgcg |
| | | tgactcaactgccgaatggcagagacttccacatgagcgtggtccgcgctaggcgaaacgactccgggacc |
| | | tacctgtgcggagccatctcgctggcgcctaaggcccaaatcaaagagagcttgagggccgaactgagagt |
| | | gaccgagcgcagagctgaggtgccaactgcacatccatccccatcgcctcggcctgcggggcagtttcaga |
| | | ccctggtcacgaccactccggcgccgcgcccaccgactccggccccaactatcgcgagccagcccctgtc |
| | | gctgaggccggaagcatgccgccctgccgccggaggtgctgtgcatacccggggattggacttcgcatgc |
| | | gacatctacatttgggctcctctcgccggaacttgtggcgtgctccttctgtccctggtcatcaccctgtactgca |
| | | agcggggtcggaaaaagcttctgtacattttcaagcagcccttcatgaggcccgtgcaaaccacccaggagg |
| | | aggacggttgctcctgccggttccccgaagaggaagaaggaggttgcgagctgcgcgtgaagttctcccgg |
| | | agcgccgacgcccccgcctataagcagggccagaaccagctgtacaacgaactgaacctgggacggcgg |
| | | gaagagtacgatgtgctggacaagcggcgcggccgggaccccgaaatgggcgggaagcctagaagaaa |
| | | gaaccctcaggaaggcctgtataacgagctgcagaaggacaagatggccgaggcctactccgaaattggg |
| | | atgaagggagagcggcggaggggaaaggggcacgacggcctgtaccaaggactgtccaccgccaccaa |
| | | ggacacatacgatgccctgcacatgcaggcccttccccctcgc |
| 28 | linker | (Gly-Gly-Gly-Ser)ₙ, where n = 1-10 |
| 29 | linker | (Gly4 Ser)4 |
| 30 | linker | (Gly4 Ser)3 |
| 31 | linker | (Gly3Ser) |
| 32 | polyA | (aaaaaaaaaa)ₙ, where n = 200 |
| 33 | polyA | (aaaaaaaaaa)ₙ, where n = 15 |
| 34 | polyA | (aaaaaaaaaa)ₙ, where n = 500 |
| 35 | polyA | (tttttttttt)ₙ, where n = 10 |
| 36 | polyA | (tttttttttt)ₙ where n = 500 |
| 37 | polyA | (aaaaaaaaaa)ₙ, where n = 500 |
| 38 | polyA | (aaaaaaaaaa)ₙ, where n = 40 |
| 39 | PD1 CAR | Pgwfldspdrpwnpptfspallvvtegdnatftcsfsntsesfvlnwvrmspsnqtdklaafpedrsqpg |
| | (aa) | qdcrfrvtqlpngrdfhmsvvrarrndsgtvlcgaislapkaqikeslraelrvterraevptahpspsprpa |
| | | gqfqtlvtttpaprpptpaptiasqplslrpeacrpaaggavhtrgldfacdiviwaplagtcgvlllslvitly |
| | | ckrgrkkllyifkqpfmrpvqttqeedgcscrfpeeeeggcelrvkfsrsadapaykqgqnqlynelnlgr |
| | | reeydvldkrrgrdpemggkprrknpqeglynelqkdkmaeayseigmkgerrrgkghdglyqglst |
| | | atkdtydalhmqalppr |
| 427 | CD28 | RSKRSRLLHSDX₁MX₂MTPRRPGPTRKHYQPYAPPRDFAAYRS |
| | costimulatory | (wherein X₁ and X₂ can be any amino acid) |
| | domain (aa) | |
| 428 | CD28 | RSKRSRLLHSDYMFMTPRRPGPTRKHYQPYAPPRDFAAYRS |
| | costimulatory | |
| | domain (aa) | |
| 429 | CD28 | RSKRSRLLHSDFMNMTPRRPGPTRKHYQPYAPPRDFAAYRS |
| | costimulatory | |
| | domain (aa) | |
| 430 | CD28 | RSKRSRLLHSDFMFMTPRRPGPTRKHYQPYAPPRDFAAYRS |
| | costimulatory | |
| | domain (aa) | |
| 5 | CD28 | RSKRSRLLHSDYMNMTPRRPGPTRKHYQPYAPPRDFAAYRS |
| | costimulatory | |
| | domain (aa) | |
| 6 | CD28 | aggagtaagaggagcaggctcctgcacagtgactacatgaacatgactccccgccgccccgggcccacccg |
| | costimulatory | caagcattaccagccctatgccccaccacgcgacttcgcagcctatcgctcc |
| | domain (na) | |
| 7 | CD28 | aggagtaagaggagcaggctcctgcacagtgactacatgttcatgactccccgccgccccgggcccaccc |
| | costimulatory | gcaagcattaccagccctatgccccaccacgcgacttcgcagcctatcgctcc |
| | domain (na) | |
| 8 | CD28 | aggagtaagaggagcaggctcctgcacagtgacttcatgaacatgactccccgccgccccgggcccaccc |
| | costimulatory | gcaagcattaccagccctatgccccaccacgcgacttcgcagcctatcgctcc |
| | domain (na) | |
| 9 | CD28 | aggagtaagaggagcaggctcctgcacagtgacttcatgttcatgactccccgccgccccgggcccacccg |
| | costimulatory | caagcattaccagccctatgccccaccacgcgacttcgcagcctatcgctcc |
| | domain (na) | |

### Cancer Associated Antigens

[0376] In certain aspects, the present invention provides immune effector cells (e.g., T cells, NK cells) that are engineered to contain one or more CARs that direct the immune effector cells to cancer. This is achieved through an antigen binding domain on the CAR that is specific for a cancer associated antigen. There are two classes of cancer associated antigens (tumor antigens) that can be targeted by the CARs of the instant invention: (1) cancer associated antigens that are expressed on the surface of cancer cells; and (2) cancer associated antigens that itself is intracellar, however, a fragment of such antigen (peptide) is presented on the surface of the cancer cells by MHC (major histocompatibility complex).

[0377] Accordingly, the present invention provides CARs that target the following cancer associated antigens (tumor antigens): CD19, CD123, CD22, CD30, CD171, CS-1, CLL-1 (CLECL1), CD33, EGFRvIII, GD2, GD3, BCMA, Tn Ag, PSMA, ROR1, FLT3, FAP, TAG72, CD38, CD44v6, CEA, EPCAM, B7H3, KIT, IL-13Ra2, Mesothelin, IL-11Ra, PSCA, VEGFR2, LewisY, CD24, PDGFR-beta, PRSS21, SSEA-4, CD20, Folate receptor alpha, ERBB2 (Her2/neu), MUC1, EGFR, NCAM, Prostase, PAP, ELF2M, Ephrin B2, IGF-I receptor, CAIX, LMP2, gp100, bcr-abl, tyrosinase, EphA2, Fucosyl GM1, sLe, GM3, TGS5, HMWMAA, o-acetyl-GD2, Folate receptor beta, TEM1/CD248, TEM7R, CLDN6, TSHR, GPRC5D, CXORF61, CD97, CD179a, ALK, Polysialic acid, PLAC1, GloboH, NY-BR-1, UPK2, HAVCR1, ADRB3, PANX3, GPR20, LY6K, OR51E2, TARP, WT1, NY-ESO-1, LAGE-1a, legumain, HPV E6,E7, MAGE-A1, MAGE A1, ETV6-AML, sperm protein 17, XAGE1, Tie 2, MAD-CT-1, MAD-CT-2, Fos-related antigen 1, p53, p53 mutant, prostein, survivin and telomerase, PCTA-1/Galectin 8, MelanA/MART1, Ras mutant, hTERT, sarcoma translocation breakpoints, ML-IAP, ERG (TMPRSS2 ETS fusion gene), NA17, PAX3, Androgen receptor, Cyclin B1, MYCN, RhoC, TRP-2, CYP1B1, BORIS, SART3, PAX5, OY-TES1, LCK, AKAP-4, SSX2, RAGE-1, human telomerase reverse transcriptase, RU1, RU2, intestinal carboxyl esterase, mut hsp70-2, CD79a, CD79b, CD72, LAIR1, FCAR, LILRA2, CD300LF, CLEC12A, BST2, EMR2, LY75, GPC3, FCRL5, and IGLL1.

### Tumor-Supporting Antigens

[0378] A CAR described herein can comprise an antigen binding domain (e.g., antibody or antibody fragment, TCR or TCR fragment) that binds to a tumor-supporting antigen (e.g., a tumor-supporting antigen as described herein). In some embodiments, the tumor-supporting antigen is an antigen present on a stromal cell or a myeloid-derived suppressor cell (MDSC). Stromal cells can secrete growth factors to promote cell division in the microenvironment. MDSC cells can inhibit T cell proliferation and activation. Without wishing to be bound by theory, in some embodiments, the CAR-expressing cells destroy the tumor-supporting cells, thereby indirectly inhibiting tumor growth or survival.

[0379] In embodiments, the stromal cell antigen is chosen from one or more of: bone marrow stromal cell antigen 2 (BST2), fibroblast activation protein (FAP) and tenascin. In an embodiment, the FAP-specific antibody is, competes for binding with, or has the same CDRs as, sibrotuzumab. In embodiments, the MDSC antigen is chosen from one or more of: CD33, CD11b, C14, CD15, and CD66b. Accordingly, in some embodiments, the tumor-supporting antigen is chosen from one or more of: bone marrow stromal cell antigen 2 (BST2), fibroblast activation protein (FAP) or tenascin, CD33, CD11b, C14, CD15, and CD66b.

### Exemplary Chimeric Antigen Receptor (CAR)

[0380] The present invention encompasses a recombinant DNA construct comprising sequences encoding a CAR, wherein the CAR comprises an antigen binding domain (e.g., antibody or antibody fragment, TCR or TCR fragment) that binds specifically to a cancer associated antigen described herein, wherein the sequence of the antigen binding domain is contiguous with and in the same reading frame as a nucleic acid sequence encoding an intracellular signaling domain. The intracellular signaling domain can comprise a costimulatory signaling domain and/or a primary signaling domain, e.g., a zeta chain. The costimulatory signaling domain refers to a portion of the CAR comprising at least a portion of the intracellular domain of a costimulatory molecule.

[0381] In specific aspects, a CAR construct of the invention comprises a scFv domain, wherein the scFv may be preceded by an optional leader sequence such as provided in SEQ ID NO: 401, and followed by an optional hinge sequence such as provided in SEQ ID NO:403 or SEQ ID NO:405 or SEQ ID NO:407 or SEQ ID NO:10, a transmembrane region such as provided in SEQ ID NO:12, an intracellular signaling domain that includes SEQ ID NO:14, 16, 427-430, or 5, and a CD3 zeta sequence that includes SEQ ID NO:18 or SEQ ID NO:20, e.g., wherein the domains are contiguous with and in the same reading frame to form a single fusion protein.

[0382] In one aspect, an exemplary CAR constructs comprise an optional leader sequence (e.g., a leader sequence described herein), an extracellular antigen binding domain (e.g., an antigen binding domain described herein), a hinge (e.g., a hinge region described herein), a transmembrane domain (e.g., a transmembrane domain described herein), and an intracellular stimulatory domain (e.g., an intracellular stimulatory domain described herein). In one aspect, an exemplary CAR construct comprises an optional leader sequence (e.g., a leader sequence described herein), an extracellular antigen binding domain (e.g., an antigen binding domain described herein), a hinge (e.g., a hinge region described herein), a transmembrane domain (e.g., a transmembrane domain described herein), an intracellular costimulatory signaling domain (e.g., a costimulatory signaling domain described herein) and/or an intracellular primary signaling domain (e.g., a primary signaling domain described herein).

[0383] An exemplary leader sequence is provided as SEQ ID NO: 401. An exemplary hinge/spacer sequence is provided as SEQ ID NO: 403 or SEQ ID NO:405 or SEQ ID NO:407 or SEQ ID NO:10. An exemplary transmembrane domain sequence is provided as SEQ ID NO:12. An exemplary sequence of the intracellular signaling domain of CD28 is provided as SEQ ID NOs: 427-430 and 5. An exemplary CD3zeta domain sequence is provided as SEQ ID NO: 18 or SEQ ID NO:20.

[0384] In one aspect, the present invention encompasses a recombinant nucleic acid construct comprising a nucleic acid molecule encoding a CAR, wherein the nucleic acid molecule comprises the nucleic acid sequence encoding an antigen binding domain, e.g., described herein, that is contiguous with and in the same reading frame as a nucleic acid sequence encoding an intracellular signaling domain

[0385] In one aspect, the present invention encompasses a recombinant nucleic acid construct comprising a nucleic acid molecule encoding a CAR, wherein the nucleic acid molecule comprises a nucleic acid sequence encoding an antigen binding domain, wherein the sequence is contiguous with and in the same reading frame as the nucleic acid sequence encoding an intracellular signaling domain. An exemplary intracellular signaling domain that can be used in the CAR includes, but is not limited to, one or more intracellular signaling domains of, e.g., CD3-zeta, CD28, CD27, 4-1BB, a functional variant thereof, and the like. In some instances, the CAR can comprise any combination of CD3-zeta, CD28, 4-1BB, and the like.

[0386] The nucleic acid sequences coding for the desired molecules can be obtained using recombinant methods known in the art, such as, for example by screening libraries from cells expressing the nucleic acid molecule, by deriving the nucleic acid molecule from a vector known to include the same, or by isolating directly from cells and tissues containing the same, using standard techniques. Alternatively, the nucleic acid of interest can be produced synthetically, rather than cloned.

[0387] The present invention includes retroviral and lentiviral vector constructs expressing a CAR that can be directly transduced into a cell.

[0388] The present invention also includes an RNA construct that can be directly transfected into a cell. A method for generating mRNA for use in transfection involves in vitro transcription (IVT) of a template with specially designed primers, followed by polyA addition, to produce a construct containing 3′ and 5′ untranslated sequence (“UTR”) (e.g., a 3′ and/or 5′ UTR described herein), a 5′ cap (e.g., a 5′ cap described herein) and/or Internal Ribosome Entry Site (IRES) (e.g., an IRES described herein), the nucleic acid to be expressed, and a polyA tail, typically 50-2000 bases in length (SEQ ID NO:32). RNA so produced can efficiently transfect different kinds of cells. In one embodiment, the template includes sequences for the CAR. In an embodiment, an RNA CAR vector is transduced into a cell, e.g., a T cell or a NK cell, by electroporation.

### Antigen Binding Domain

[0389] In one aspect, the CAR of the invention comprises a target-specific binding element otherwise referred to as an antigen binding domain. The choice of moiety depends upon the type and number of ligands that define the surface of a target cell. For example, the antigen binding domain may be chosen to recognize a ligand that acts as a cell surface marker on target cells associated with a particular disease state. Thus, examples of cell surface markers that may act as ligands for the antigen binding domain in a CAR of the invention include those associated with viral, bacterial and parasitic infections, autoimmune disease and cancer cells.

[0390] In one aspect, the CAR-mediated T-cell response can be directed to an antigen of interest by way of engineering an antigen binding domain that specifically binds a desired antigen into the CAR.

[0391] In one aspect, the portion of the CAR comprising the antigen binding domain comprises an antigen binding domain that targets a tumor antigen, e.g., a tumor antigen described herein.

[0392] The antigen binding domain can be any domain that binds to the antigen including but not limited to a monoclonal antibody, a polyclonal antibody, a recombinant antibody, a human antibody, a humanized antibody, and a functional fragment thereof, including but not limited to a single-domain antibody such as a heavy chain variable domain (VH), a light chain variable domain (VL) and a variable domain (VHH) of camelid derived nanobody, and to an alternative scaffold known in the art to function as antigen binding domain, such as a recombinant fibronectin domain, a T cell receptor (TCR), or a fragment there of, e.g., single chain TCR, and the like. In some instances, it is beneficial for the antigen binding domain to be derived from the same species in which the CAR will ultimately be used in. For example, for use in humans, it may be beneficial for the antigen binding domain of the CAR to comprise human or humanized residues for the antigen binding domain of an antibody or antibody fragment.

[0393] In one embodiment, an antigen binding domain against CD22 is an antigen binding portion, e.g., CDRs, of an antibody described in, e.g., Haso et al., Blood, 121(7): 1165-1174 (2013); Wayne et al., Clin Cancer Res 16(6): 1894-1903 (2010); Kato et al., Leuk Res 37(1):83-88 (2013); Creative BioMart (creativebiomart.net): MOM-18047-S(P).

[0394] In one embodiment, an antigen binding domain against CS-1 is an antigen binding portion, e.g., CDRs, of Elotuzumab (BMS), see e.g., Tai et al., 2008, Blood 112(4):1329-37; Tai et al., 2007, Blood. 110(5):1656-63.

[0395] In one embodiment, an antigen binding domain against CLL-1 is an antigen binding portion, e.g., CDRs, of an antibody available from R&D, ebiosciences, Abcam, for example, PE-CLL1-hu Cat #353604 (BioLegend); and PE-CLL1 (CLEC12A) Cat #562566 (BD).

[0396] In one embodiment, an antigen binding domain against CD33 is an antigen binding portion, e.g., CDRs, of an antibody described in, e.g., Bross et al., Clin Cancer Res 7(6):1490-1496 (2001) (Gemtuzumab Ozogamicin, hP67.6), Caron et al., Cancer Res 52(24):6761-6767 (1992) (Lintuzumab, HuM195), Lapusan et al., Invest New Drugs 30(3):1121-1131 (2012) (AVE9633), Aigner et al., Leukemia 27(5): 1107-1115 (2013) (AMG330, CD33 BiTE), Dutour et al., Adv hematol 2012:683065 (2012), and Pizzitola et al., Leukemia doi:10.1038/Lue.2014.62 (2014).

[0397] In one embodiment, an antigen binding domain against GD2 is an antigen binding portion, e.g., CDRs, of an antibody described in, e.g., Mujoo et al., Cancer Res. 47(4):1098-1104 (1987); Cheung et al., Cancer Res 45(6):2642-2649 (1985), Cheung et al., J Clin Oncol 5(9):1430-1440 (1987), Cheung et al., J Clin Oncol 16(9):3053-3060 (1998), Handgretinger et al., Cancer Immunol Immunother 35(3):199-204 (1992). In some embodiments, an antigen binding domain against GD2 is an antigen binding portion of an antibody selected from mAb 14.18, 14G2a, ch14.18, hu14.18, 3F8, hu3F8, 3G6, 8B6, 60C3, 10B8, ME36.1, and 8H9, see e.g., WO2012033885, WO2013040371, WO2013192294, WO2013061273, WO2013123061, WO2013074916, and WO201385552. In some embodiments, an antigen binding domain against GD2 is an antigen binding portion of an antibody described in US Publication No.: 20100150910 or PCT Publication No.: WO 2011160119.

[0398] In one embodiment, an antigen binding domain against BCMA is an antigen binding portion, e.g., CDRs, of an antibody described in, e.g., WO2012163805, WO200112812, and WO2003062401.

[0399] In one embodiment, an antigen binding domain against Tn antigen is an antigen binding portion, e.g., CDRs, of an antibody described in, e.g., U.S. Pat. No. 8,440,798, Brooks et al., PNAS 107(22):10056-10061 (2010), and Stone et al., OncoImmunology 1(6):863-873(2012).

[0400] In one embodiment, an antigen binding domain against PSMA is an antigen binding portion, e.g., CDRs, of an antibody described in, e.g., Parker et al., Protein Expr Purif 89(2):136-145 (2013), US 20110268656 (J591 ScFv); Frigerio et al, European J Cancer 49(9):2223-2232 (2013) (scFvD2B); WO 2006125481 (mAbs 3/A12, 3/E7 and 3/F11) and single chain antibody fragments (scFv A5 and D7).

[0401] In one embodiment, an antigen binding domain against ROR1 is an antigen binding portion, e.g., CDRs, of an antibody described in, e.g., Hudecek et al., Clin Cancer Res 19(12):3153-3164 (2013); WO 2011159847; and US20130101607.

[0402] In one embodiment, an antigen binding domain against FLT3 is an antigen binding portion, e.g., CDRs, of an antibody described in, e.g., WO2011076922, U.S. Pat. No. 5,777,084, EP0754230, US20090297529, and several commercial catalog antibodies (R&D, ebiosciences, Abcam).

[0403] In one embodiment, an antigen binding domain against TAG72 is an antigen binding portion, e.g., CDRs, of an antibody described in, e.g., Hombach et al., Gastroenterology 113(4):1163-1170 (1997); and Abcam ab691.

[0404] In one embodiment, an antigen binding domain against FAP is an antigen binding portion, e.g., CDRs, of an antibody described in, e.g., Ostermann et al., Clinical Cancer Research 14:4584-4592 (2008) (FAP5), US Pat. Publication No. 2009/0304718; sibrotuzumab (see e.g., Hofheinz et al., Oncology Research and Treatment 26(1), 2003); and Tran et al., J Exp Med 210(6):1125-1135 (2013).

[0405] In one embodiment, an antigen binding domain against CD38 is an antigen binding portion, e.g., CDRs, of daratumumab (see, e.g., Groen et al., Blood 116(21):1261-1262 (2010); MOR202 (see, e.g., U.S. Pat. No. 8,263,746); or antibodies described in U.S. Pat. No. 8,362,211.

[0406] In one embodiment, an antigen binding domain against CD44v6 is an antigen binding portion, e.g., CDRs, of an antibody described in, e.g., Casucci et al., Blood 122(20):3461-3472 (2013).

[0407] In one embodiment, an antigen binding domain against CEA is an antigen binding portion, e.g., CDRs, of an antibody described in, e.g., Chmielewski et al., Gastroenterology 143(4):1095-1107 (2012).

[0408] In one embodiment, an antigen binding domain against EPCAM is an antigen binding portion, e.g., CDRS, of an antibody selected from MT110, EpCAM-CD3 bispecific Ab (see, e.g., clinicaltrials.gov/ct2/show/NCT00635596); Edrecolomab; 3622W94; ING-1; and adecatumumab (MT201).

[0409] In one embodiment, an antigen binding domain against PRSS21 is an antigen binding portion, e.g., CDRs, of an antibody described in U.S. Pat. No. 8,080,650.

[0410] In one embodiment, an antigen binding domain against B7H3 is an antigen binding portion, e.g., CDRs, of an antibody MGA271 (Macrogenics).

[0411] In one embodiment, an antigen binding domain against KIT is an antigen binding portion, e.g., CDRs, of an antibody described in, e.g., U.S. Pat. No. 7,915,391, US20120288506, and several commercial catalog antibodies.

[0412] In one embodiment, an antigen binding domain against IL-13Ra2 is an antigen binding portion, e.g., CDRs, of an antibody described in, e.g., WO2008/146911, WO2004087758, several commercial catalog antibodies, and WO2004087758.

[0413] In one embodiment, an antigen binding domain against CD30 is an antigen binding portion, e.g., CDRs, of an antibody described in, e.g., U.S. Pat. No. 7,090,843 B1, and EP0805871.

[0414] In one embodiment, an antigen binding domain against GD3 is an antigen binding portion, e.g., CDRs, of an antibody described in, e.g., U.S. Pat. Nos. 7,253,263; 8,207,308; US 20120276046; EP1013761; WO2005035577; and U.S. Pat. No. 6,437,098.

[0415] In one embodiment, an antigen binding domain against CD171 is an antigen binding portion, e.g., CDRs, of an antibody described in, e.g., Hong et al., J Immunother 37(2):93-104 (2014).

[0416] In one embodiment, an antigen binding domain against IL-11Ra is an antigen binding portion, e.g., CDRs, of an antibody available from Abcam (cat #ab55262) or Novus Biologicals (cat #EPR5446). In another embodiment, an antigen binding domain again IL-11Ra is a peptide, see, e.g., Huang et al., Cancer Res 72(1):271-281 (2012).

[0417] In one embodiment, an antigen binding domain against PSCA is an antigen binding portion, e.g., CDRs, of an antibody described in, e.g., Morgenroth et al., Prostate 67(10):1121-1131 (2007) (scFv 7F5); Nejatollahi et al., J of Oncology 2013(2013), article ID 839831 (scFv C5-II); and US Pat Publication No. 20090311181.

[0418] In one embodiment, an antigen binding domain against VEGFR2 is an antigen binding portion, e.g., CDRs, of an antibody described in, e.g., Chinnasamy et al., J Clin Invest 120(11):3953-3968 (2010).

[0419] In one embodiment, an antigen binding domain against LewisY is an antigen binding portion, e.g., CDRs, of an antibody described in, e.g., Kelly et al., Cancer Biother Radiopharm 23(4):411-423 (2008) (hu3S193 Ab (scFvs)); Dolezal et al., Protein Engineering 16(1):47-56 (2003) (NC10 scFv).

[0420] In one embodiment, an antigen binding domain against CD24 is an antigen binding portion, e.g., CDRs, of an antibody described in, e.g., Maliar et al., Gastroenterology 143(5):1375-1384 (2012).

[0421] In one embodiment, an antigen binding domain against PDGFR-beta is an antigen binding portion, e.g., CDRs, of an antibody Abcam ab32570.

[0422] In one embodiment, an antigen binding domain against SSEA-4 is an antigen binding portion, e.g., CDRs, of antibody MC813 (Cell Signaling), or other commercially available antibodies.

[0423] In one embodiment, an antigen binding domain against CD20 is an antigen binding portion, e.g., CDRs, of the antibody Rituximab, Ofatumumab, Ocrelizumab, Veltuzumab, or GA101.

[0424] In one embodiment, an antigen binding domain against Folate receptor alpha is an antigen binding portion, e.g., CDRs, of the antibody IMGN853, or an antibody described in US20120009181; U.S. Pat. No. 4,851,332, LK26: U.S. Pat. No. 5,952,484.

[0425] In one embodiment, an antigen binding domain against ERBB2 (Her2/neu) is an antigen binding portion, e.g., CDRs, of the antibody trastuzumab, or pertuzumab.

[0426] In one embodiment, an antigen binding domain against MUC1 is an antigen binding portion, e.g., CDRs, of the antibody SAR566658.

[0427] In one embodiment, the antigen binding domain against EGFR is antigen binding portion, e.g., CDRs, of the antibody cetuximab, panitumumab, zalutumumab, nimotuzumab, or matuzumab.

[0428] In one embodiment, an antigen binding domain against NCAM is an antigen binding portion, e.g., CDRs, of the antibody clone 2-2B: MAB5324 (EMD Millipore)

[0429] In one embodiment, an antigen binding domain against Ephrin B2 is an antigen binding portion, e.g., CDRs, of an antibody described in, e.g., Abengozar et al., Blood 119(19):4565-4576 (2012).

[0430] In one embodiment, an antigen binding domain against IGF-I receptor is an antigen binding portion, e.g., CDRs, of an antibody described in, e.g., U.S. Pat. No. 8,344,112 B2; EP2322550 A1; WO 2006/138315, or PCT/US2006/022995.

[0431] In one embodiment, an antigen binding domain against CAIX is an antigen binding portion, e.g., CDRs, of the antibody clone 303123 (R&D Systems).

[0432] In one embodiment, an antigen binding domain against LMP2 is an antigen binding portion, e.g., CDRs, of an antibody described in, e.g., U.S. Pat. No. 7,410,640, or US20050129701.

[0433] In one embodiment, an antigen binding domain against gp100 is an antigen binding portion, e.g., CDRs, of the antibody HMB45, NKIbetaB, or an antibody described in WO2013165940, or US20130295007

[0434] In one embodiment, an antigen binding domain against tyrosinase is an antigen binding portion, e.g., CDRs, of an antibody described in, e.g., U.S. Pat. No. 5,843,674; or US19950504048.

[0435] In one embodiment, an antigen binding domain against EphA2 is an antigen binding portion, e.g., CDRs, of an antibody described in, e.g., Yu et al., Mol Ther 22(1):102-111 (2014).

[0436] In one embodiment, an antigen binding domain against GD3 is an antigen binding portion, e.g., CDRs, of an antibody described in, e.g., U.S. Pat. Nos. 7,253,263; 8,207,308; US 20120276046; EP1013761 A3; 20120276046; WO2005035577; or U.S. Pat. No. 6,437,098.

[0437] In one embodiment, an antigen binding domain against fucosyl GM1 is an antigen binding portion, e.g., CDRs, of an antibody described in, e.g., US20100297138; or WO2007/067992.

[0438] In one embodiment, an antigen binding domain against sLe is an antigen binding portion, e.g., CDRs, of the antibody G193 (for lewis Y), see Scott A M et al, Cancer Res 60: 3254-61 (2000), also as described in Neeson et al, J Immunol May 2013 190 (Meeting Abstract Supplement) 177.10.

[0439] In one embodiment, an antigen binding domain against GM3 is an antigen binding portion, e.g., CDRs, of the antibody CA 2523449 (mAb 14F7).

[0440] In one embodiment, an antigen binding domain against HMWMAA is an antigen binding portion, e.g., CDRs, of an antibody described in, e.g., Kmiecik et al., Oncoimmunology 3(1):e27185 (2014) (PMID: 24575382) (mAb9.2.27); U.S. Pat. No. 6,528,481; WO2010033866; or US 20140004124.

[0441] In one embodiment, an antigen binding domain against o-acetyl-GD2 is an antigen binding portion, e.g., CDRs, of the antibody 8B6.

[0442] In one embodiment, an antigen binding domain against TEM1/CD248 is an antigen binding portion, e.g., CDRs, of an antibody described in, e.g., Marty et al., Cancer Lett 235(2):298-308 (2006); Zhao et al., J Immunol Methods 363(2):221-232 (2011).

[0443] In one embodiment, an antigen binding domain against CLDN6 is an antigen binding portion, e.g., CDRs, of the antibody IMAB027 (Ganymed Pharmaceuticals), see e.g., clinicaltrial.gov/show/NCT02054351.

[0444] In one embodiment, an antigen binding domain against TSHR is an antigen binding portion, e.g., CDRs, of an antibody described in, e.g., U.S. Pat. No. 8,603,466; U.S. Pat. No. 8,501,415; or U.S. Pat. No. 8,309,693.

[0445] In one embodiment, an antigen binding domain against GPRC5D is an antigen binding portion, e.g., CDRs, of the antibody FAB6300A (R&D Systems); or LS-A4180 (Lifespan Biosciences).

[0446] In one embodiment, an antigen binding domain against CD97 is an antigen binding portion, e.g., CDRs, of an antibody described in, e.g., U.S. Pat. No. 6,846,911;de Groot et al., J Immunol 183(6):4127-4134 (2009); or an antibody from R&D:MAB3734.

[0447] In one embodiment, an antigen binding domain against ALK is an antigen binding portion, e.g., CDRs, of an antibody described in, e.g., Mino-Kenudson et al., Clin Cancer Res 16(5):1561-1571 (2010).

[0448] In one embodiment, an antigen binding domain against polysialic acid is an antigen binding portion, e.g., CDRs, of an antibody described in, e.g., Nagae et al., J Biol Chem 288(47):33784-33796 (2013).

[0449] In one embodiment, an antigen binding domain against PLAC1 is an antigen binding portion, e.g., CDRs, of an antibody described in, e.g., Ghods et al., Biotechnol Appl Biochem 2013 doi:10.1002/bab.1177.

[0450] In one embodiment, an antigen binding domain against GloboH is an antigen binding portion of the antibody VK9; or an antibody described in, e.g., Kudryashov V et al, Glycoconj J. 15(3):243-9 (1998), Lou et al., Proc Natl Acad Sci USA 111(7):2482-2487 (2014); MBr1: Bremer E-G et al. J Biol Chem 259:14773-14777 (1984).

[0451] In one embodiment, an antigen binding domain against NY-BR-1 is an antigen binding portion, e.g., CDRs of an antibody described in, e.g., Jager et al., Appl Immunohistochem Mol Morphol 15(1):77-83 (2007).

[0452] In one embodiment, an antigen binding domain against WT-1 is an antigen binding portion, e.g., CDRs, of an antibody described in, e.g., Dao et al., Sci Transl Med 5(176):176ra33 (2013); or WO2012/135854.

[0453] In one embodiment, an antigen binding domain against MAGE-A1 is an antigen binding portion, e.g., CDRs, of an antibody described in, e.g., Willemsen et al., J Immunol 174(12):7853-7858 (2005) (TCR-like scFv).

[0454] In one embodiment, an antigen binding domain against sperm protein 17 is an antigen binding portion, e.g., CDRs, of an antibody described in, e.g., Song et al., Target Oncol 2013 Aug. 14 (PMID: 23943313); Song et al., Med Oncol 29(4):2923-2931 (2012).

[0455] In one embodiment, an antigen binding domain against Tie 2 is an antigen binding portion, e.g., CDRs, of the antibody AB33 (Cell Signaling Technology).

[0456] In one embodiment, an antigen binding domain against MAD-CT-2 is an antigen binding portion, e.g., CDRs, of an antibody described in, e.g., PMID: 2450952; U.S. Pat. No. 7,635,753.

[0457] In one embodiment, an antigen binding domain against Fos-related antigen 1 is an antigen binding portion, e.g., CDRs, of the antibody 12F9 (Novus Biologicals).

[0458] In one embodiment, an antigen binding domain against MelanA/MART1 is an antigen binding portion, e.g., CDRs, of an antibody described in, EP2514766 A2; or U.S. Pat. No. 7,749,719.

[0459] In one embodiment, an antigen binding domain against sarcoma translocation breakpoints is an antigen binding portion, e.g., CDRs, of an antibody described in, e.g., Luo et al, EMBO Mol. Med. 4(6):453-461 (2012).

[0460] In one embodiment, an antigen binding domain against TRP-2 is an antigen binding portion, e.g., CDRs, of an antibody described in, e.g., Wang et al, J Exp Med. 184(6):2207-16 (1996).

[0461] In one embodiment, an antigen binding domain against CYP1B1 is an antigen binding portion, e.g., CDRs, of an antibody described in, e.g., Maecker et al, Blood 102 (9): 3287-3294 (2003).

[0462] In one embodiment, an antigen binding domain against RAGE-1 is an antigen binding portion, e.g., CDRs, of the antibody MAB5328 (EMD Millipore).

[0463] In one embodiment, an antigen binding domain against human telomerase reverse transcriptase is an antigen binding portion, e.g., CDRs, of the antibody cat no: LS-B95-100 (Lifespan Biosciences)

[0464] In one embodiment, an antigen binding domain against intestinal carboxyl esterase is an antigen binding portion, e.g., CDRs, of the antibody 4F12: cat no: LS-B6190-50 (Lifespan Biosciences).

[0465] In one embodiment, an antigen binding domain against mut hsp70-2 is an antigen binding portion, e.g., CDRs, of the antibody Lifespan Biosciences: monoclonal: cat no: LS-C133261-100 (Lifespan Biosciences).

[0466] In one embodiment, an antigen binding domain against CD79a is an antigen binding portion, e.g., CDRs, of the antibody Anti-CD79a antibody [HM47/A9] (ab3121), available from Abcam; antibody CD79A Antibody #3351 available from Cell Signaling Technology; or antibody HPA017748-Anti-CD79A antibody produced in rabbit, available from Sigma Aldrich.

[0467] In one embodiment, an antigen binding domain against CD79b is an antigen binding portion, e.g., CDRs, of the antibody polatuzumab vedotin, anti-CD79b described in Dornan et al., “Therapeutic potential of an anti-CD79b antibody-drug conjugate, anti-CD79b-vc-MMAE, for the treatment of non-Hodgkin lymphoma” Blood. 2009 Sep. 24; 114(13):2721-9. doi: 10.1182/blood-2009-02-205500. Epub 2009 Jul. 24, or the bispecific antibody Anti-CD79b/CD3 described in “4507 Pre-Clinical Characterization of T Cell-Dependent Bispecific Antibody Anti-CD79b/CD3 As a Potential Therapy for B Cell Malignancies” Abstracts of 56^{th} ASH Annual Meeting and Exposition, San Francisco, Calif. Dec. 6-9 2014.

[0468] In one embodiment, an antigen binding domain against CD72 is an antigen binding portion, e.g., CDRs, of the antibody J3-109 described in Myers, and Uckun, “An anti-CD72 immunotoxin against therapy-refractory B-lineage acute lymphoblastic leukemia.” Leuk Lymphoma. 1995 June; 18(1-2):119-22, or anti-CD72 (10D6.8.1, mIgG1) described in Polson et al., “Antibody-Drug Conjugates for the Treatment of Non-Hodgkin's Lymphoma: Target and Linker-Drug Selection” Cancer Res Mar. 15, 2009 69; 2358.

[0469] In one embodiment, an antigen binding domain against LAIR1 is an antigen binding portion, e.g., CDRs, of the antibody ANT-301 LAIR1 antibody, available from ProSpec; or anti-human CD305 (LAIR1) Antibody, available from BioLegend.

[0470] In one embodiment, an antigen binding domain against FCAR is an antigen binding portion, e.g., CDRs, of the antibody CD89/FCARAntibody (Catalog #10414-H08H), available from Sino Biological Inc.

[0471] In one embodiment, an antigen binding domain against LILRA2 is an antigen binding portion, e.g., CDRs, of the antibody LILRA2 monoclonal antibody (M17), clone 3C7, available from Abnova, or Mouse Anti-LILRA2 antibody, Monoclonal (2D7), available from Lifespan Biosciences.

[0472] In one embodiment, an antigen binding domain against CD300LF is an antigen binding portion, e.g., CDRs, of the antibody Mouse Anti-CMRF35-like molecule 1 antibody, Monoclonal[UP-D2], available from BioLegend, or Rat Anti-CMRF35-like molecule 1 antibody, Monoclonal[234903], available from R&D Systems.

[0473] In one embodiment, an antigen binding domain against CLEC12A is an antigen binding portion, e.g., CDRs, of the antibody Bispecific T cell Engager (BiTE) scFv-antibody and ADC described in Noordhuis et al., “Targeting of CLEC12A In Acute Myeloid Leukemia by Antibody-Drug-Conjugates and Bispecific CLL-1xCD3 BiTE Antibody” 53^{rd} ASH Annual Meeting and Exposition, Dec. 10-13, 2011, and MCLA-117 (Merus).

[0474] In one embodiment, an antigen binding domain against BST2 (also called CD317) is an antigen binding portion, e.g., CDRs, of the antibody Mouse Anti-CD317 antibody, Monoclonal[3H4], available from Antibodies-Online or Mouse Anti-CD317 antibody, Monoclonal[696739], available from R&D Systems.

[0475] In one embodiment, an antigen binding domain against EMR2 (also called CD312) is an antigen binding portion, e.g., CDRs, of the antibody Mouse Anti-CD312 antibody, Monoclonal[LS-B8033] available from Lifespan Biosciences, or Mouse Anti-CD312 antibody, Monoclonal[494025] available from R&D Systems.

[0476] In one embodiment, an antigen binding domain against LY75 is an antigen binding portion, e.g., CDRs, of the antibody Mouse Anti-Lymphocyte antigen 75 antibody, Monoclonal[HD30] available from EMD Millipore or Mouse Anti-Lymphocyte antigen 75 antibody, Monoclonal[A15797] available from Life Technologies.

[0477] In one embodiment, an antigen binding domain against GPC3 is an antigen binding portion, e.g., CDRs, of the antibody hGC33 described in Nakano K, Ishiguro T, Konishi H, et al. Generation of a humanized anti-glypican 3 antibody by CDR grafting and stability optimization. Anticancer Drugs. 2010 November; 21(10):907-916, or MDX-1414, HN3, or YP7, all three of which are described in Feng et al., “Glypican-3 antibodies: a new therapeutic target for liver cancer.” FEBS Lett. 2014 Jan. 21; 588(2):377-82.

[0478] In one embodiment, an antigen binding domain against FCRL5 is an antigen binding portion, e.g., CDRs, of the anti-FcRL5 antibody described in Elkins et al., “FcRL5 as a target of antibody-drug conjugates for the treatment of multiple myeloma” Mol Cancer Ther. 2012 October; 11(10):2222-32.

[0479] In one embodiment, an antigen binding domain against IGLL1 is an antigen binding portion, e.g., CDRs, of the antibody Mouse Anti-Immunoglobulin lambda-like polypeptide 1 antibody, Monoclonal[AT1G4] available from Lifespan Biosciences, Mouse Anti-Immunoglobulin lambda-like polypeptide 1 antibody, Monoclonal[HSL11] available from BioLegend.

[0480] In one embodiment, the antigen binding domain comprises one, two three (e.g., all three) heavy chain CDRs, HC CDR1, HC CDR2 and HC CDR3, from an antibody listed above, and/or one, two, three (e.g., all three) light chain CDRs, LC CDR1, LC CDR2 and LC CDR3, from an antibody listed above. In one embodiment, the antigen binding domain comprises a heavy chain variable region and/or a variable light chain region of an antibody listed above.

[0481] In another aspect, the antigen binding domain comprises a humanized antibody or an antibody fragment. In some aspects, a non-human antibody is humanized, where specific sequences or regions of the antibody are modified to increase similarity to an antibody naturally produced in a human or fragment thereof. In one aspect, the antigen binding domain is humanized.

[0482] A humanized antibody can be produced using a variety of techniques known in the art, including but not limited to, CDR-grafting (see, e.g., European Patent No. EP 239,400; International Publication No. WO 91/09967; and U.S. Pat. Nos. 5,225,539, 5,530,101, and 5,585,089, each of which is incorporated herein in its entirety by reference), veneering or resurfacing (see, e.g., European Patent Nos. EP 592,106 and EP 519,596; Padlan, 1991, Molecular Immunology, 28(4/5):489-498; Studnicka et al., 1994, Protein Engineering, 7(6):805-814; and Roguska et al., 1994, PNAS, 91:969-973, each of which is incorporated herein by its entirety by reference), chain shuffling (see, e.g., U.S. Pat. No. 5,565,332, which is incorporated herein in its entirety by reference), and techniques disclosed in, e.g., U.S. Patent Application Publication No. US2005/0042664, U.S. Patent Application Publication No. US2005/0048617, U.S. Pat. Nos. 6,407,213, 5,766,886, International Publication No. WO 9317105, Tan et al., J. Immunol., 169:1119-25 (2002), Caldas et al., Protein Eng., 13(5):353-60 (2000), Morea et al., Methods, 20(3):267-79 (2000), Baca et al., J. Biol. Chem., 272(16):10678-84 (1997), Roguska et al., Protein Eng., 9(10):895-904 (1996), Couto et al., Cancer Res., 55 (23 Supp):5973s-5977s (1995), Couto et al., Cancer Res., 55(8):1717-22 (1995), Sandhu J S, Gene, 150(2):409-10 (1994), and Pedersen et al., J. Mol. Biol., 235(3):959-73 (1994), each of which is incorporated herein in its entirety by reference. Often, framework residues in the framework regions will be substituted with the corresponding residue from the CDR donor antibody to alter, for example improve, antigen binding. These framework substitutions are identified by methods well-known in the art, e.g., by modeling of the interactions of the CDR and framework residues to identify framework residues important for antigen binding and sequence comparison to identify unusual framework residues at particular positions. (See, e.g., Queen et al., U.S. Pat. No. 5,585,089; and Riechmann et al., 1988, Nature, 332:323, which are incorporated herein by reference in their entireties.)

[0483] A humanized antibody or antibody fragment has one or more amino acid residues remaining in it from a source which is nonhuman. These nonhuman amino acid residues are often referred to as “import” residues, which are typically taken from an “import” variable domain. As provided herein, humanized antibodies or antibody fragments comprise one or more CDRs from nonhuman immunoglobulin molecules and framework regions wherein the amino acid residues comprising the framework are derived completely or mostly from human germline. Multiple techniques for humanization of antibodies or antibody fragments are well-known in the art and can essentially be performed following the method of Winter and co-workers (Jones et al., Nature, 321:522-525 (1986); Riechmann et al., Nature, 332:323-327 (1988); Verhoeyen et al., Science, 239:1534-1536 (1988)), by substituting rodent CDRs or CDR sequences for the corresponding sequences of a human antibody, i.e., CDR-grafting (EP 239,400; PCT Publication No. WO 91/09967; and U.S. Pat. Nos. 4,816,567; 6,331,415; 5,225,539; 5,530,101; 5,585,089; 6,548,640, the contents of which are incorporated herein by reference herein in their entirety). In such humanized antibodies and antibody fragments, substantially less than an intact human variable domain has been substituted by the corresponding sequence from a nonhuman species. Humanized antibodies are often human antibodies in which some CDR residues and possibly some framework (FR) residues are substituted by residues from analogous sites in rodent antibodies. Humanization of antibodies and antibody fragments can also be achieved by veneering or resurfacing (EP 592,106; EP 519,596; Padlan, 1991, Molecular Immunology, 28(4/5):489-498; Studnicka et al., Protein Engineering, 7(6):805-814 (1994); and Roguska et al., PNAS, 91:969-973 (1994)) or chain shuffling (U.S. Pat. No. 5,565,332), the contents of which are incorporated herein by reference herein in their entirety.

[0484] The choice of human variable domains, both light and heavy, to be used in making the humanized antibodies is to reduce antigenicity. According to the so-called “best-fit” method, the sequence of the variable domain of a rodent antibody is screened against the entire library of known human variable-domain sequences. The human sequence which is closest to that of the rodent is then accepted as the human framework (FR) for the humanized antibody (Sims et al., J. Immunol., 151:2296 (1993); Chothia et al., J. Mol. Biol., 196:901 (1987), the contents of which are incorporated herein by reference herein in their entirety). Another method uses a particular framework derived from the consensus sequence of all human antibodies of a particular subgroup of light or heavy chains. The same framework may be used for several different humanized antibodies (see, e.g., Nicholson et al. Mol. Immun 34 (16-17): 1157-1165 (1997); Carter et al., Proc. Natl. Acad. Sci. USA, 89:4285 (1992); Presta et al., J. Immunol., 151:2623 (1993), the contents of which are incorporated herein by reference herein in their entirety). In some embodiments, the framework region, e.g., all four framework regions, of the heavy chain variable region are derived from a VH4_4-59 germline sequence. In one embodiment, the framework region can comprise, one, two, three, four or five modifications, e.g., substitutions, e.g., from the amino acid at the corresponding murine sequence. In one embodiment, the framework region, e.g., all four framework regions of the light chain variable region are derived from a VK3_1.25 germline sequence. In one embodiment, the framework region can comprise, one, two, three, four or five modifications, e.g., substitutions, e.g., from the amino acid at the corresponding murine sequence.

[0485] In some aspects, the portion of a CAR composition of the invention that comprises an antibody fragment is humanized with retention of high affinity for the target antigen and other favorable biological properties. According to one aspect of the invention, humanized antibodies and antibody fragments are prepared by a process of analysis of the parental sequences and various conceptual humanized products using three-dimensional models of the parental and humanized sequences. Three-dimensional immunoglobulin models are commonly available and are familiar to those skilled in the art. Computer programs are available which illustrate and display probable three-dimensional conformational structures of selected candidate immunoglobulin sequences. Inspection of these displays permits analysis of the likely role of the residues in the functioning of the candidate immunoglobulin sequence, e.g., the analysis of residues that influence the ability of the candidate immunoglobulin to bind the target antigen. In this way, FR residues can be selected and combined from the recipient and import sequences so that the desired antibody or antibody fragment characteristic, such as increased affinity for the target antigen, is achieved. In general, the CDR residues are directly and most substantially involved in influencing antigen binding.

[0486] A humanized antibody or antibody fragment may retain a similar antigenic specificity as the original antibody, e.g., in the present invention, the ability to bind human a cancer associated antigen as described herein. In some embodiments, a humanized antibody or antibody fragment may have improved affinity and/or specificity of binding to human a cancer associated antigen as described herein.

[0487] In one aspect, the antigen binding domain of the invention is characterized by particular functional features or properties of an antibody or antibody fragment. For example, in one aspect, the portion of a CAR composition of the invention that comprises an antigen binding domain specifically binds a tumor antigen as described herein.

[0488] In one aspect, the anti-cancer associated antigen as described herein binding domain is a fragment, e.g., a single chain variable fragment (scFv). In one aspect, the anti-cancer associated antigen as described herein binding domain is a Fv, a Fab, a (Fab′)2, or a bi-functional (e.g. bi-specific) hybrid antibody (e.g., Lanzavecchia et al., Eur. J. Immunol. 17, 105 (1987)). In one aspect, the antibodies and fragments thereof of the invention binds a cancer associated antigen as described herein protein with wild-type or enhanced affinity.

[0489] In some instances, scFvs can be prepared according to method known in the art (see, for example, Bird et al., (1988) Science 242:423-426 and Huston et al., (1988) Proc. Natl. Acad. Sci. USA 85:5879-5883). ScFv molecules can be produced by linking VH and VL regions together using flexible polypeptide linkers. The scFv molecules comprise a linker (e.g., a Ser-Gly linker) with an optimized length and/or amino acid composition. The linker length can greatly affect how the variable regions of a scFv fold and interact. In fact, if a short polypeptide linker is employed (e.g., between 5-10 amino acids) intrachain folding is prevented. Interchain folding is also required to bring the two variable regions together to form a functional epitope binding site. For examples of linker orientation and size see, e.g., Hollinger et al. 1993 Proc Natl Acad. Sci. U.S.A. 90:6444-6448, U.S. Patent Application Publication Nos. 2005/0100543, 2005/0175606, 2007/0014794, and PCT publication Nos. WO2006/020258 and WO2007/024715, is incorporated herein by reference.

[0490] An scFv can comprise a linker of at least 1, 2, 3, 4, 5, 6, 7, 8, 9, 10, 11, 12, 13, 14, 15, 16, 17, 18, 19, 20, 25, 30, 35, 40, 45, 50, or more amino acid residues between its VL and VH regions. The linker sequence may comprise any naturally occurring amino acid. In some embodiments, the linker sequence comprises amino acids glycine and serine. In another embodiment, the linker sequence comprises sets of glycine and serine repeats such as (Gly₄Ser)ₙ, where n is a positive integer equal to or greater than 1 (SEQ ID NO:22). In one embodiment, the linker can be (Gly₄Ser)₄ (SEQ ID NO:29) or (Gly₄Ser)₃(SEQ ID NO:30). Variation in the linker length may retain or enhance activity, giving rise to superior efficacy in activity studies.

[0491] In another aspect, the antigen binding domain is a T cell receptor (“TCR”), or a fragment thereof, for example, a single chain TCR (scTCR). Methods to make such TCRs are known in the art. See, e.g., Willemsen R A et al, Gene Therapy 7: 1369-1377 (2000); Zhang T et al, Cancer Gene Ther 11: 487-496 (2004); Aggen et al, Gene Ther. 19(4):365-74 (2012) (references are incorporated herein by its entirety). For example, scTCR can be engineered that contains the Vα and Vβ genes from a T cell clone linked by a linker (e.g., a flexible peptide). This approach is very useful to cancer associated target that itself is intracellar, however, a fragment of such antigen (peptide) is presented on the surface of the cancer cells by MHC.

[0492] In one embodiment, an antigen binding domain against EGFRvIII is an antigen binding portion, e.g., CDRs, of a CAR, antibody or antigen-binding fragment thereof described in, e.g., PCT publication WO2014/130657 or US2014/0322275A1. In one embodiment, the CAR molecule comprises an EGFRvIII CAR, or an antigen binding domain according to Table 2 or SEQ ID NO:11 of WO 2014/130657, incorporated herein by reference, or a sequence substantially identical thereto (e.g., at least 85%, 90%, 95% or more identical thereto). The amino acid and nucleotide sequences encoding the EGFRvIII CAR molecules and antigen binding domains (e.g., including one, two, three VH CDRs; and one, two, three VL CDRs according to Kabat or Chothia), are specified in WO 2014/130657.

[0493] In one embodiment, an antigen binding domain against mesothelin is an antigen binding portion, e.g., CDRs, of an antibody, antigen-binding fragment or CAR described in, e.g., PCT publication WO2015/090230. In one embodiment, an antigen binding domain against mesothelin is an antigen binding portion, e.g., CDRs, of an antibody, antigen-binding fragment, or CAR described in, e.g., PCT publication WO1997/025068, WO1999/028471, WO2005/014652, WO2006/099141, WO2009/045957, WO2009/068204, WO2013/142034, WO2013/040557, or WO2013/063419.

[0494] In an embodiment, the CAR molecule comprises a mesothelin CAR described herein, e.g., a mesothelin CAR described in WO 2015/090230, incorporated herein by reference. In embodiments, the mesothelin CAR comprises an amino acid, or has a nucleotide sequence shown in Tables 2 or 3, or a sequence substantially identical to any of the aforesaid sequences (e.g., at least 85%, 90%, 95% or more identical to any of the aforesaid mesothelin CAR sequences). In one embodiment, the CAR molecule comprises a mesothelin CAR, or an antigen binding domain according to Tables 2-3 of WO 2015/090230, incorporated herein by reference and included in adapted form below, or a sequence substantially identical thereto (e.g., at least 85%, 90%, 95% or more identical thereto). The amino acid and nucleotide sequences encoding the mesothelin CAR molecules and antigen binding domains (e.g., including one, two, three VH CDRs; and one, two, three VL CDRs according to Kabat or Chothia), are specified in WO 2015/090230.

TABLE 2
Amino Acid Sequences of Human scFvs and CARs (bold underline is the leader
sequence and grey box is a linker sequence). In the case of the scFvs,the
remaining amino acids are the heavy chain variable region and light chain
variable regions, with each of the HC CDRs (HC CDR1, HC CDR2, HC CDR3)and
LC CDRs (LC CDR1, LC CDR2,LCCDR3) underlined). In the case of the CARs,the
further remaining amino acids are the remaining amino acids of the CARs.)

| SEQ | | |
|---|---|---|
| ID | | |
| NO: | Description | Amino Acid Sequence |
| 431 | M1 (ScFv | QVQLQQSGAEVKKPGASVKVSCKASGYTFTGYYMHWVRQ |
| | domain) | APGQGLEWMGRINPNSGGTKYAQKFQGRVTMTRDTSISTAYMELSRLRSEDTAVYYCARG |
| | | [chemical structure] |
| | | CRASQSVSSNFAWYQQRPGQAPRLLIYDASNRATGIPPRFSGSGSGTDFTLTISSLEPED |
| | | FAAYYCHQRSNWLYTFGQGTKVDIK |
| 432 | M1 (full) >ZA53- 27BC (M11 | [chemical structure] |
| | ZA53- | CRASQSVSSNFAWYQQRPGQAPRLLIYDASNRATGIPPRFSGSGSGTDFTLTISSLEPED |
| | 27BC | FAAYYCHQRSNWLYTFGQGTKVDIKTTTPAPRPPTPAPTIASQPLSLRPEACRPAAGGAV |
| | R001-A11 | HTRGLDFACDIYIWAPLAGTCGVLLLSLVITLYCKRGRKKLLYIFKQPFMRPVQTTQEED |
| | 126161) | GCSCRFPEEEEGGCELRVKFSRSADAPAYKQGQNQLYNELNLGRREEYDVLDKRRGRDPE |
| | | MGGKPRRKNPQEGLYNELQKDKMAEAYSEIGMKGERRRGKGHDGLYQGLSTATKDTYDAL |
| | | HMQALPPR |
| 433 | M2 (ScFv | QVQLVQSGAEVKKPGASVKVSCKASGYTFTGYYMHWVRQ |
| | domain) | APGQGLEWMGWINPNSGGTKYAQKFQGRVTMTRDTSISTAYMELSRLRSDDTAVYYCARD |
| | | [chemical structure] |
| | | SVGDRVTITCQASQDISNSLNWYQQKAGKAPKLLIYDASTLETGVPSRFSGSGSGTDFSF |
| | | TISSLQPEDIATYYCQQHDNLPLTFGQGTKVEIK |
| 434 | M2 (full) >FA56- 26RC (M2 | [chemical structure] |
| | FA56- | SVGDRVTITCQASQDISNSLNWYQQKAGKAPKLLIYDASTLETGVPSRFSGSGSGTDFSF |
| | 26RC | TISSLQPEDIATYYCQQHDNLPLTFGQGTKVEIKTTTPAPRPPTPAPTIASQPLSLRPEA |
| | R001-A10 | CRPAAGGAVHTRGLDFACDIYIWAPLAGTCGVLLLSLVITLYCKRGRKKLLYIFKQPFMR |
| | 126162) | PVQTTQEEDGCSCRFPEEEEGGCELRVKFSRSADAPAYKQGQNQLYNELNLGRREEYDVL |
| | | DKRRGRDPEMGGKPRRKNPQEGLYNELQKDKMAEAYSEIGMKGERRRGKGHDGLYQGLST |
| | | ATKDTYDALHMQALPPR |
| 435 | M3 (ScFv | QVQLVQSGAEVKKPGAPVKVSCKASGYTFTGYYMHWVRQ |
| | domain) | APGQGLEWMGWINPNSGGTNYAQKFQGRVTMTRDTSISTAYMELSRLRSDDTAVYYCARG |
| | | [chemical structure] |
| | | TITCRASQSINTYLNWYQHKPGKAPKLLIYAASSLQSGVPSRFSGSGSGTDFTLTISSLQ |
| | | PEDFATYYCQQSFSPLTFGGGTKLEIK |
| 436 | M3 >VA58- 21LC (M3 | [chemical structure] |
| | VA58- | TITCRASQSINTYLNWYQHKPGKAPKLLIYAASSLQSGVPSRFSGSGSGTDFTLTISSLQ |
| | 21LC | PEDFATYYCQQSFSPLTFGGGTKLEIKTTTPAPRPPTPAPTIASQPLSLRPEACRPAAGG |
| | R001-A1 | AVHTRGLDFACDIYIWAPLAGTCGVLLLSLVITLYCKRGRKKLLYIFKQPFMRPVQTTQE |
| | 126163) | EDGCSCRFPEEEEGGCELRVKFSRSADAPAYKQGQNQLYNELNLGRREEYDVLDKRRGRD |
| | | PEMGGKPRRKNPQEGLYNELQKDKMAEAYSEIGMKGERRRGKGHDGLYQGLSTATKDTYD |
| | | ALHMQALPPR |
| 437 | M4 (ScFv | QVQLVESGGGLVQPGGSLRLSCAASGFTFSSYWMHWVRQ |
| | domain) | VPGKGLVWVSRINTDGSTTTYADSVEGRFTISRDNAKNTLYLQMNSLRDDDTAVYYCVGG |
| | | [chemical structure] |
| | | SQSISDRLAWYQQKPGKAPKLLIYKASSLESGVPSRFSGSGSGTEFTLTISSLQPDDFAV |
| | | YYCQQYGHLPMYTFGQGTKVEIK |
| 438 | M4 >DP37- 07IC (M4 | [chemical structure] |
| | DP37- | SQSISDRLAWYQQKPGKAPKLLIYKASSLESGVPSRFSGSGSGTEFTLTISSLQPDDFAV |
| | 07IC | YYCQQYGHLPMYTFGQGTKVEIKTTTPAPRPPTPAPTIASQPLSLRPEACRPAAGGAVHT |
| | R001-C6 | RGLDFACDIYIWAPLAGTCGVLLLSLVITLYCKRGRKKLLYIFKQPFMRPVQTTQEEDGC |
| | 126164) | SCRFPEEEEGGCELRVKFSRSADAPAYKQGQNQLYNELNLGRREEYDVLDKRRGRDPEMG |
| | | GKPRRKNPQEGLYNELQKDKMAEAYSEIGMKGERRRGKGHDGLYQGLSTATKDTYDALHM |
| | | QALPPR |
| 439 | M5 (ScFv | QVQLVQSGAEVEKPGASVKVSCKASGYTFTDYYMHWVRQ |
| | domain) | APGQGLEWMGWINPNSGGTNYAQKFQGRVTMTRDTSISTAYMELSRLRSDDTAVYYCASG |
| | | [chemical structure] |
| | | ASQSIRYYLSWYQQKPGKAPKLLIYTASILQNGVPSRFSGSGSGTDFTLTISSLQPEDFA |
| | | TYYCLQTYTTPDFGPGTKVEIK |
| 440 | M5 >XP31- 20LC | [chemical structure] |
| | (M5 | ASQSIRYYLSWYQQKPGKAPKLLIYTASILQNGVPSRFSGSGSGTDFTLTISSLQPEDFA |
| | XP31- | TYYCLQTYTTPDFGPGTKVEIKTTTPAPRPPTPAPTIASQPLSLRPEACRPAAGGAVHTR |
| | 20LC | GLDFACDIYIWAPLAGTCGVLLLSLVITLYCKRGRKKLLYIFKQPFMRPVQTTQEEDGCS |
| | R001-B4 | CRFPEEEEGGCELRVKFSRSADAPAYKQGQNQLYNELNLGRREEYDVLDKRRGRDPEMGG |
| | 126165) | KPRRKNPQEGLYNELQKDKMAEAYSEIGMKGERRRGKGHDGLYQGLSTATKDTYDALHMQ |
| | | ALPPR |
| 441 | M6 (ScFv | QVQLVQSGAEVKKPGASVKVSCKASGYTFTSYYMHWVRQ |
| | domain) | APGQGLEWMGIINPSGGSTSYAQKFQGRVTMTRDTSTSTVYMELSSLRSEDTAVYYCARY |
| | | [chemical structure] |
| | | SVGDRVTITCRASQGVGRWLAWYQQKPGTAPKLLIYAASTLQSGVPSRFSGSGSGTDFTL |
| | | TINNLQPEDFATYYCQQANSFPLTFGGGTRLEIK |
| 442 | M6 >FE10- 06ID | [chemical structure] |
| | (M6 | SVGDRVTITCRASQGVGRWLAWYQQKPGTAPKLLIYAASTLQSGVPSRFSGSGSGTDFTL |
| | 46FE10- | TINNLQPEDFATYYCQQANSFPLTFGGGTRLEIKTTTPAPRPPTPAPTIASQPLSLRPEA |
| | 06ID | CRPAAGGAVHTRGLDFACDIYIWAPLAGTCGVLLLSLVITLYCKRGRKKLLYIFKQPFMR |
| | R001-A4 | PVQTTQEEDGCSCRFPEEEEGGCELRVKFSRSADAPAYKQGQNQLYNELNLGRREEYDVL |
| | 126166) | DKRRGRDPEMGGKPRRKNPQEGLYNELQKDKMAEAYSEIGMKGERRRGKGHDGLYQGLST |
| | | ATKDTYDALHMQALPPR |
| 443 | M7 (ScFv | QVQLVQSGGGWQPGRSLRLSCAASGFTFSSYAMHWVRQ |
| | domain) | APGKGLEWVAVISYDGSNKYYADSVKGRFTISRDNSKNTLYLQMNSLRAEDTAVYYCARW |
| | | [chemical structure] |
| | | AILSCRASQSVYTKYLGWYQQKPGQAPRLLIYDASTRATGIPDRFSGSGSGTDFTLTINR |
| | | LEPEDFAVYYCQHYGGSPLITFGQGTRLEIK |
| 444 | M7 >VE12- 01CD (M7 | [chemical structure] |
| | VE12- | AILSCRASQSVYTKYLGWYQQKPGQAPRLLIYDASTRATGIPDRFSGSGSGTDFTLTINR |
| | 01CD | LEPEDFAVYYCQHYGGSPLITFGQGTRLEIKTTTPAPRPPTPAPTIASQPLSLRPEACRP |
| | R001-A5 | AAGGAVHTRGLDFACDIYIWAPLAGTCGVLLLSLVITLYCKRGRKKLLYIFKQPFMRPVQ |
| | 126167) | TTQEEDGCSCRFPEEEEGGCELRVKFSRSADAPAYKQGQNQLYNELNLGRREEYDVLDKR |
| | | RGRDPEMGGKPRRKNPQEGLYNELQKDKMAEAYSEIGMKGERRRGKGHDGLYQGLSTATK |
| | | DTYDALHMQALPPR |
| 445 | M8 (ScFv | QVQLQQSAEVKKPGASVKVSCKTSGYPFTGYSLHWVRQ |
| | domain) | APGQGLEWMGWINPNSGGTNYAQKFQGRVTMTRDTSISTAYMELSRLRSDDTAVYYCARD |
| | | [chemical structure] |
| | | ITCRASQDSGTWLAWYQQKPGKAPNLLMYDASTLEDGVPSRFSGSASGTEFTLTVNRLQP |
| | | EDSATYYCQQYNSYPLTFGGGTKVDIK |
| 446 | M8 >LE13- 05XD | [chemical structure] |
| | (M8 | ITCRASQDSGTWLAWYQQKPGKAPNLLMYDASTLEDGVPSRFSGSASGTEFTLTVNRLQP |
| | LE13- | EDSATYYCQQYNSYPLTFGGGTKVDIKTTTPAPRPPTPAPTIASQPLSLRPEACRPAAGG |
| | 05XD | AVHTRGLDFACDIYIWAPLAGTCGVLLLSLVITLYCKRGRKKLLYIFKQPFMRPVQTTQE |
| | R001-E5 | EDGCSCRFPEEEEGGCELRVKFSRSADAPAYKQGQNQLYNELNLGRREEYDVLDKRRGRD |
| | 126168) | PEMGGKPRRKNPQEGLYNELQKDKMAEAYSEIGMKGERRRGKGHDGLYQGLSTATKDTYD |
| | | ALHMQALPPR |
| 447 | M9 (ScFv | QVQLVQSGAEVKKPGASVEVSCKASGYTFTSYYMHWVRQ |
| | domain) | APGQGLEWMGIINPSGGSTGYAQKFQGRVTMTRDTSTSTVHMELSSLRSEDTAVYYCARG |
| | | [chemical structure] |
| | | VTITCRASQDISSALAWYQQKPGTPPKLLIYDASSLESGVPSRFSGSGSGTDFTLTISSL |
| | | QPEDFATYYCQQFSSYPLTFGGGTRLEIK |
| 448 | M9 >BE15- 00SD | [chemical structure] |
| | (M9 | VTITCRASQDISSALAWYQQKPGTPPKLLIYDASSLESGVPSRFSGSGSGTDFTLTISSL |
| | BE15- | QPEDFATYYCQQFSSYPLTFGGGTRLEIKTTTPAPRPPTPAPTIASQPLSLRPEACRPAA |
| | 00SD | GGAVHTRGLDFACDIYIWAPLAGTCGVLLLSLVITLYCKRGRKKLLYIFKQPFMRPVQTT |
| | R001-A3 | QEEDGCSCRFPEEEEGGCELRVKFSRSADAPAYKQGQNQLYNELNLGRREEYDVLDKRRG |
| | 126169) | RDPEMGGKPRRKNPQEGLYNELQKDKMAEAYSEIGMKGERRRGKGHDGLYQGLSTATKDT |
| | | YDALHMQALPPR |
| 449 | M10 (ScFv | QVQLVQSGAEVKKPGASVKVSCKASGYTFTSYGISWVRQ |
| | domain) | APGQGLEWMGWISAYNGNTNYAQKLQGRVTMTTDTSTSTAYMELRSLRSDDTAVYYCARV |
| | | [chemical structure] |
| | | RATISCKSSHSVLYNRNNKNYLAWYQQKPGQPPKLLFYWASTRKSGVPDRFSGSGSGTDF |
| | | TLTISSLQPEDFATYFCQQTQTFPLTFGQGTRLEIN |
| 450 | M10 >RE16- 05MD | [chemical structure] |
| | (M10 | RATISCKSSHSVLYNRNNKNYLAWYQQKPGQPPKLLFYWASTRKSGVPDRFSGSGSGTDF |
| | RE16- | TLTISSLQPEDFATYFCQQTQTFPLTFGQGTRLEINTTTPAPRPPTPAPTIASQPLSLRP |
| | 05MD | EACRPAAGGAVHTRGLDFACDIYIWAPLAGTCGVLLLSLVITLYCKRGRKKLLYIFKQPF |
| | R01-D10 | MRPVQTTQEEDGCSCRFPEEEEGGCELRVKFSRSADAPAYKQGQNQLYNELNLGRREEYD |
| | 126170) | VLDKRRGRDPEMGGKPRRKNPQEGLYNELQKDKMAEAYSEIGMKGERRRGKGHDGLYQGL |
| | | STATKDTYDALHMQALPPR |
| 451 | M11 (ScFv | QVQLQQSGAEVKKPGASVKVSCKASGYTFTGYYMHWVRQ |
| | domain) | APGQGLEWMGWINPNSGGTNYAQNFQGRVTMTRDTSISTAYMELRRLRSDDTAVYYCASG |
| | | [chemical structure] |
| | | ASQSIRYYLSWYQQKPGKAPKLLIYTASILQNGVPSRFSGSGSGTDFTLTISSLQPEDFA |
| | | TYYCLQTYTTPDFGPGTKVEIK |
| 452 | M11 >NE10- 19WD | [chemical structure] |
| | (M11 | ASQSIRYYLSWYQQKPGKAPKLLIYTASILQNGVPSRFSGSGSGTDFTLTISSLQPEDFA |
| | NE10- | TYYCLQTYTTPDFGPGTKVEIKTTTPAPRPPTPAPTIASQPLSLRPEACRPAAGGAVHTR |
| | 19WD | GLDFACDIYIWAPLAGTCGVLLLSLVITLYCKRGRKKLLYIFKQPFMRPVQTTQEEDGCS |
| | R001-G2 | CRFPEEEEGGCELRVKFSRSADAPAYKQGQNQLYNELNLGRREEYDVLDKRRGRDPEMGG |
| | 126171) | KPRRKNPQEGLYNELQKDKMAEAYSEIGMKGERRRGKGHDGLYQGLSTATKDTYDALHMQ |
| | | ALPPR |
| 453 | M12 (ScFv | QVQLVQSGAEVKKPGASVKVSCKASGYTFTGYYMHWVRQ |
| | domain) | APGQGLEWMGRINPNSGGTNYAQKFQGRVTMTTDTSTSTAYMELRSLRSDDTAVYYCART |
| | | [chemical structure] |
| | | TCRASQSISTWLAWYQQKPGKAPNLLIYKASTLESGVPSRFSGSGSGTEFTLTISSLQPD |
| | | DFATYYCQQYNTYSPYTFGQGTKLEIK |
| 454 | M12 >DE12- 14RD | [chemical structure] |
| | (M12 | TCRASQSISTWLAWYQQKPGKAPNLLIYKASTLESGVPSRFSGSGSGTEFTLTISSLQPD |
| | DE12- | DFATYYCQQYKTYSPYTFGQGTKLEIKTTTPAPRPPTPAPTIASQPLSLRPEACRPAAGG |
| | 14RD | AVHTRGLDFACDIYIWAPLAGTCGVLLLSLVITLYCKRGRKKLLYIFKQPFMRPVQTTQE |
| | R001-G9 | EDGCSCRFPEEEEGGCELRVKFSRSADAPAYKQGQNQLYNELNLGRREEYDVLDKRRGRD |
| | 126172) | PEMGGKPRRKNPQEGLYNELQKDKMAEAYSEIGMKGERRRGKGHDGLYQGLSTATKDTYD |
| | | ALHMQALPPR |
| 455 | M13 (ScFv | QVQLVQSGGGLVKPGGSLRLSCEASGFIFSDYYMGWIRQ |
| | domain) | APGKGLEWVSYIGRSGSSMYYAPSVKGRFTFSRDNAKNSLYLQMNSLRAEDTAVYYCAAS |
| | | [chemical structure] |
| | | ATLSCRASQSVTSNYLAWYQQKPGQAPRLLLFGASTRATGIPDRFSGSGSGTDFTLTINR |
| | | LEPEDFAMYYCQQYGSAPVTFGQGTKLEIK |
| 456 | M13 >TE13- 19LD | [chemical structure] |
| | (M13 | ATLSCRASQSVTSNYLAWYQQKPGQAPRLLLFGASTRATGIPDRFSGSGSGTDFTLTINR |
| | TE13- | LEPEDFAMYYCQQYGSAPVTFGQGTKLEIKTTTPAPRPPTPAPTIASQPLSLRPEACRPA |
| | 19LD | AGGAVHTRGLDFACDIYIWAPLAGTCGVLLLSLVITLYCKRGRKKLLYIFKQPFMRPVQT |
| | R002-C3 | TQEEDGCSCRFPEEEEGGCELRVKFSRSADAPAYKQGQNQLYNELNLGRREEYDVLDKRR |
| | 126173) | GRDPEMGGKPRRKNPQEGLYNELQKDKMAEAYSEIGMKGERRRGKGHDGLYQGLSTATKD |
| | | TYDALHMQALPPR |
| 457 | M14 (ScFv | QVQLVQSGAEVRAPGASVKISCKASGFTFRGYYIHWVRQ |
| | domain) | APGQGLEWMGIINPSGGSRAYAQKFQGRVTMTRDTSTSTVYMELSSLRSDDTAMYYCART |
| | | [chemical structure] |
| | | RVTITCRASENVNIWLAWYQQKPGKAPKLLIYKSSSLASGVPSRFSGSGSGAEFTLTISS |
| | | LQPDDFATYYCQQYQSYPLTFGGGTKVDIK |
| 458 | M14 >BS83- 95ID | [chemical structure] |
| | (M14 | RVTITCRASENVNIWLAWYQQKPGKAPKLLIYKSSSLASGVPSRFSGSGSGAEFTLTISS |
| | BS83- | LQPDDFATYYCQQYQSYPLTFGGGTKVDIKTTTPAPRPPTPAPTIASQPLSLRPEACRPA |
| | 95ID | AGGAVHTRGLDFACDIYIWAPLAGTCGVLLLSLVITLYCKRGRKKLLYIFKQPFMRPVQT |
| | R001-E8 | TQEEDGCSCRFPEEEEGGCELRVKFSRSADAPAYKQGQNQLYNELNLGRREEYDVLDKRR |
| | 126174) | GRDPEMGGKPRRKNPQEGLYNELQKDKMAEAYSEIGMKGERRRGKGHDGLYQGLSTATKD |
| | | TYDALHMQALPPR |
| 459 | M15 (ScFv | QVQLVQSGGGLVQPGRSLRLSCAASGFTFDDYAMHWVRQ |
| | domain) | APGKGLEWVSGISWNSGSIGYADSVKGRFTISRDNAKNSLYLQMNSLRAEDTAVYYCAKD |
| | | [chemical structure] |
| | | QGDALRSYYASWYQQKPGQAPMLVIYGKNNRPSGIPDRFSGSDSGDTASLTITGAQAEDE |
| | | ADYYCNSRDSSGYPVFGTGTKVTVL |
| 460 | M15 >HS86- 94XD | [chemical structure] |
| | (M15 | QGDALRSYYASWYQQKPGQAPMLVTYGKNNRPSGIPDRFSGSDSGDTASLTITGAQAEDE |
| | HS86- | ADYYCNSRDSSGYPVFGTGTKVTVLTTTPAPRPPTPAPTIASQPLSLRPEACRPAAGGAV |
| | 94XD | HTRGLDFACDIYIWAPLAGTCGVLLLSLVITLYCKRGRKKLLYIFKQPFMRPVQTTQEED |
| | NT | GCSCRFPEEEEGGCELRVKFSRSADAPAYKQGQNQLYNELNLGRREEYDVLDKRRGRDPE |
| | 127553) | MGGKPRRKNPQEGLYNELQKDKMAEAYSEIGMKGERRRGKGHDGLYQGLSTATKDTYDAL |
| | | HMQALPPR |
| 461 | M16 (ScFv | EVQLVESGGGLVQPGRSLRLSCAASGFTFDDYAMHWVRQ |
| | domain) | APGKGLEWVSGISWNSGSTGYADSVKGRFTISRDNAKNSLYLQMNSLRAEDTALYYCAKD |
| | | [chemical structure] |
| | | CQGDSLRSYYASWYQQKPGQAPVLVIFGRSRRPSGIPDRFSGSSSGNTASLIITGAQAED |
| | | EADYYCNSRDNTANHYVFGTGTKLTVL |
| 462 | M16 >XS87- 99RD | [chemical structure] |
| | (M16 | CQGDSLRSYYASWYQQKPGQAPVLVIFGRSRRPSGIPDRFSGSSSGNTASLIITGAQAED |
| | XS87- | EADYYCNSRDNTANHYVFGTGTKLTVLTTTPAPRPPTPAPTIASQPLSLRPEACRPAAGG |
| | 99RD | AVHTRGLDFACDIYIWAPLAGTCGVLLLSLVITLYCKRGRKKLLYIFKQPFMRPVQTTQE |
| | NT | EDGCSCRFPEEEEGGCELRVKFSRSADAPAYKQGQNQLYNELNLGRREEYDVLDKRRGRD |
| | 127554) | PEMGGKPRRKNPQEGLYNELQKDKMAEAYSEIGMKGERRRGKGHDGLYQGLSTATKDTYD |
| | | ALHMQALPPR |
| 463 | M17 (ScFv | EVQLVESGGGLVQPGRSLRLSCAASGFTFDDYAMHWVRQ |
| | domain) | APGKGLEWVSGISWNSGSTGYADSVKGRFTISRDNAKNSLYLQMNSLRAEDTALYYCAKD |
| | | [chemical structure] |
| | | CQGDSLRSYYASWYQQKPGQAPVLVIYGKNNRPSGIPDRFSGSSSGNTASLTITGAQAED |
| | | EADYYCNSRGSSGNHYVFGTGTKVTVL |
| 464 | M17 >NS89- 94MD | [chemical structure] |
| | (M17 | CQGDSLRSYYASWYQQKPGQAPVLVIYGKNNRPSGIPDRFSGSSSGNTASLTITGAQAED |
| | NS89- | EADYYCNSRGSSGNHYVFGTGTKVTVLTTTPAPRPPTPAPTIASQPLSLRPEACRPAAGG |
| | 94MD | AVHTRGLDFACDIYIWAPLAGTCGVLLLSLVITLYCKRGRKKLLYIFKQPFMRPVQTTQE |
| | NT | EDGCSCRFPEEEEGGCELRVKFSRSADAFAYKQGQNQLYNELNLGRREEYDVLDKRRGRD |
| | 127555) | PEMGGKPRRKNPQEGLYNELQKDKMAEAYSEIGMKGERRRGKGHDGLYQGLSTATKDTYD |
| | | ALHMQALPPR |
| 465 | M18 (ScFv | QVQLVQSGGGLVQPGGSLRLSCAASGFTFSSYWMHWVRQ |
| | domain) | APGKGLVWVSRINSDGSSTSYADSVKGRFTISRDNAKNTLYLQMNSLRAEDTAVYYCVRT |
| | | [chemical structure] |
| | | RATLSCRASQSVSSNYLAWYQQKPGQPPRLLIYDVSTRATGIPARFSGGGSGTDFTLTIS |
| | | SLEPEDFAVYYCQQRSNWPPWTFGQGTKVEIK |
| 466 | M18 >DS90- 09HD | [chemical structure] |
| | (M18 | RATLSCRASQSVSSNYLAWYQQKPGQPPRLLIYDVSTRATGIPARFSGGGSGTDFTLTIS |
| | DS90- | SLEPEDFAVYYCQQRSNWPPWTFGQGTKVEIKTTTPAPRPPTPAPTIASQPLSLRPEACR |
| | 09HD | PAAGGAVHTRGLDFACDIYIWAPLAGTCGVLLLSLVITLYCKRGRKKLLYIFKQPFMRPV |
| | R003-A05 | QTTQEEDGCSCRFPEEEEGGCELRVKFSRSADAPAYKQGQNQLYNELNLGRREEYDVLDK |
| | 127556) | RRGRDPEMGGKPRRKNPQEGLYNELQKDKMAEAYSEIGMKGERRRGKGHDGLYQGLSTAT |
| | | KDTYDALHMQALPPR |
| 467 | M19 (ScFv | QVQLVQSGGGVVQPGRSLRLSCAASGFTFSSYGMHWVRQ |
| | domain) | APGKGLEWVAVISYDGSNKYYADSVKGRFTISRDNSKNTLYLQMNSLRAEDTAVYYCAKG |
| | | [chemical structure] |
| | | AILSCRASQSVYTKYLGWYQQKPGQAPRLLIYDASTRATGIPDRFSGSGSGTDFTLTINR |
| | | LEPEDFAVYYCQHYGGSPLITFGQGTKVDIK |
| 468 | M19 >TS92- 04BD | [chemical structure] |
| | (M19 | AILSCRASQSVYTKYLGWYQQKPGQAPRLLIYDASTRATGIPDRFSGSGSGTDFTLTINR |
| | TS92- | LEPEDFAVYYCQHYGGSPLITFGQGTKVDIKTTTPAPRPPTPAPTIASQPLSLRPEACRP |
| | 04BD | AAGGAVHTRGLDFACDIYIWAPLAGTCGVLLLSLVITLYCKRGRKKLLYIFKQPFMRPVQ |
| | R003-C06 | TTQEEDGCSCRFPEEEEGGCELRVKFSRSADAPAYKQGQNQLYNELNLGRREEYDVLDKR |
| | 127557) | RGRDPEMGGKPRRKNPQEGLYNELQKDKMAEAYSEIGMKGERRRGKGHDGLYQGLSTATK |
| | | DTYDALHMQALPPR |
| 469 | M20 (ScFv | QVQLVQSGGGLVQPGGSLRLSCAASGFTFSSYAMSWVRQ |
| | domain) | APGKGLEWVSAISGSGGSTYYADSVKGRFTISRDNSKNTLYLQMNSLRAEDTAVYYCAKR |
| | | [chemical structure] |
| | | RVTITCRASQSISSYLNWYQQKPGKAPKLLIYAASSLQSGVPSRFSGSGSGTDFTLTISS |
| | | LQPEDFATYYCQQSYSIPLTFGQGTKVEIK |
| 470 | M20 >JS93- 08WD | [chemical structure] |
| | (M20 | RVTITCRASQSISSYLNWYQQKPGKAPKLLIYAASSLQSGVPSRFSGSGSGTDFTLTISS |
| | JS93- | LQPEDFATYYCQQSYSIPLTFGQGTKVEIKTTTPAPRPPTPAPTIASQPLSLRPEACRPA |
| | 08WD | AGGAVHTRGLDFACDIYIWAPLAGTCGVLLLSLVITLYCKRGRKKLLYIFKQPFMRPVQT |
| | R003-E07 | TQEEDGCSCRFPEEEEGGCELRVKFSRSADAPAYKQGQNQLYNELNLGRREEYDVLDKRR |
| | 127558) | GRDPEMGGKPRRKNPQEGLYNELQKDKMAEAYSEIGMKGERRRGKGHDGLYQGLSTATKD |
| | | TYDALHMQALPPR |
| 471 | Ss1 (scFv | QVQLQQSGPELEKPGASVKISCKASGYSFTGYTMNWVKQSHGKSLEWIGLITPYNGASS |
| | domain | YNQKFRGKATLTVDKSSSTAYMDLLSLTSEDSAVYFCARGGYDGRGFDYWGQGTTVTVS |
| | | SGGGGSGGGGSGGGGSDIELTQSPAIMSASPGEKVTMTCSASSSVSYMHWYQQKSGTSP |
| | | KRWIYDTSKLASGVPGRFSGSGSGNSYSLTISSVEAEDDATYYCQQWSGYPLTFGAGTK |
| | | LEI |
| 472 | Ss1 (full) | [chemical structure] |
| | | CSASSSVSYMHWYQQKSGTSPKRWIYDTSKLASGVPGRFSGSGSGNSYSLTISSVEAED |
| | | DATYYCQQWSGYPLTFGAGTKLEITTTPAPRPPTPAPTIASQPLSLRPEACRPAAGGAV |
| | | HTRGLDFACDIYIWAPLAGTCGVLLLSLVITLYCKRGRKKLLYIFKQPFMRPVQTTQEE |
| | | DGCSCRFPEEEEGGCELRVKFSRSADAPA |

TABLE 3
Nucleic Acid Sequences encoding CAR molecules (underlined is the leader
sequence)

| SEQ | | |
|---|---|---|
| ID | | |
| NO: | Desc. | Nucleic Acid Sequence |
| 473 | M1 | CAAGTCCAACTGCAGCAGTCAGGAGCGGAAGTGAAGAAACCAGGAGCGTCAGTCAAAGTGTCGTGCAAGGCTAGCGGCTA |
| | (ScFv | CACCTTCACCGGCTACTA |
| | domain) | CATGCACTGGGTTCGACAGGCTCCAGGGCAGGGTCTGGAGTGGATGGGCCGCATCAACCCGAATTCCGGTGGGACTAACT |
| | >ZA53- | ACGCCCAGAAGTTCCAGGGAAGAGTGACCATGACTAGGGACACGTCGATCAGCACTGCGTACATGGAACTGAGCCGCCTG |
| | 27BC | CGGTCCGAGGATACTGCCGTCTACTACTGCGCACGCGGAAGGTACTATGGAATGGACGTGTGGGGCCAAGGGACTATGGT |
| | (M1) | GACTGTGAGCTCGGGAGGGGGAGGCTCCGGTGGCGGGGGATCAGGAGGAGGAGGATCAGGGGGAGGAGGTTCCGAAATTG |
| | | TCCTCACCCAGAGCCCGGCAACCCTCTCACTTTCCCCGGGAGAGCGCGCAACCATCTCTTGCCGGGCTAGCCAATCCGTG |
| | | TCGTCCAATTTCGCCTGGTACCAGCAACGGCCGGGACAAGCCCCTAGACTCCTGATCTACGACGCCAGCAACAGAGCGAC |
| | | TGGAATTCCTCCACGCTTTTCGGGATCAGGCTCCGGTACCGACTTCACCCTGACTATCTCGTCGCTCGAACCCGAGGATT |
| | | TCGCCGCCTACTACTGTCATCAGCGGTCGAACTGGTTGTATACGTTTGGCCAGGGCACCAAGGTGGATATCAAG |
| 474 | M1 | ATGGCCCTCCCTGTCACCGCCCTGCTGCTTCCGCTGGCTCTTCTGCTCCACGCCGCTCGGCCCCAAGTCCAACTGCAGCA |
| | (Full) | G |
| | >ZA53- | TCAGGAGCGGAAGTGAAGAAACCAGGAGCGTCAGTCAAAGTGTCGTGCAAGGCTAGCGGCTACACCTTCACCGGCTACTA |
| | 27BC (M1) | CATGCACTGGGTTCGACAGGCTCCAGGGCAGGGTCTGGAGTGGATGGGCCGCATCAACCCGAATTCCGGTGGGACTAACT |
| | | ACGCCCAGAAGTTCCAGGGAAGAGTGACCATGACTAGGGACACGTCGATCAGCACTGCGTACATGGAACTGAGCCGCCTG |
| | | CGGTCCGAGGATACTGCCGTCTACTACTGCGCACGCGGAAGGTACTATGGAATGGACGTGTGGGGCCAAGGGACTATGGT |
| | | GACTGTGAGCTCGGGAGGGGGAGGCTCCGGTGGCGGGGGATCAGGAGGAGGAGGATCAGGGGGAGGAGGTTCCGAAATTG |
| | | TCCTCACCCAGAGCCCGGCAACCCTCTCACTTTCCCCGGGAGAGCGCGCAACCATCTCTTGCCGGGCTAGCCAATCCGTG |
| | | TCGTCCAATTTCGCCTGGTACCAGCAACGGCCGGGACAAGCCCCTAGACTCCTGATCTACGACGCCAGCAACAGAGCGAC |
| | | TGGAATTCCTCCACGCTTTTCGGGATCAGGCTCCGGTACCGACTTCACCCTGACTATCTCGTCGCTCGAACCCGAGGATT |
| | | TCGCCGCCTACTACTGTCATCAGCGGTCGAACTGGTTGTATACGTTTGGCCAGGGCACCAAGGTGGATATCAAGACCACT |
| | | ACCCCAGCACCGAGGCCACCCACCCCGGCTCCTACCATCGCCTCCCAGCCTCTGTCCCTGCGTCCGGAGGCATGTAGACC |
| | | CGCAGCTGGTGGGGCCGTGCATACCCGGGGTCTTGACTTCGCCTGCGATATCTACATTTGGGCCCCTCTGGCTGGTACTT |
| | | GCGGGGTCCTGCTGCTTTCACTCGTGATCACTCTTTACTGTAAGCGCGGTCGGAAGAAGCTGCTGTACATCTTTAAGCAA |
| | | CCCTTCATGAGGCCTGTGCAGACTACTCAAGAGGAGGACGGCTGTTCATGCCGGTTCCCAGAGGAGGAGGAAGGCGGCTG |
| | | CGAACTGCGCGTGAAATTCAGCCGCAGCGCAGATGCTCCAGCCTACAAGCAGGGGCAGAACCAGCTCTACAACGAACTCA |
| | | ATCTTGGTCGGAGAGAGGAGTACGACGTGCTGGACAAGCGGAGAGGACGGGACCCAGAAATGGGCGGGAAGCCGCGCAGA |
| | | AAGAATCCCCAAGAGGGCCTGTACAACGAGCTCCAAAAGGATAAGATGGCAGAAGCCTATAGCGAGATTGGTATGAAAGG |
| | | GGAACGCAGAAGAGGCAAAGGCCACGACGGACTGTACCAGGGACTCAGCACCGCCACCAAGGACACCTATGACGCTCTTC |
| | | ACATGCAGGCCCTGCCGCCTCGG |
| 475 | M2 | CAAGTCCAACTCGTCCAGTCAGGAGCAGAAGTCAAGAAACCAGGTGCTAGCGTGAAAGTGTCGTGCAAGGCGTCGGGATA |
| | (ScFv | CACTTTCACCGGATACTAC |
| | domain) | ATGCACTGGGTCCGCCAGGCCCCCGGACAAGGACTGGAATGGATGGGCTGGATCAACCCGAATAGCGGGGGAACTAATTA |
| | >FA56- | |
| | 26RC | CGCCCAGAAGTTTCAGGGACGAGTGACCATGACCCGCGATACCTCTATCTCGACCGCCTACATGGAGCTCTCCAGACTGC |
| | (M2) | GCTCCGACGATACTGCAGTGTACTACTGCGCCCGGGACCTGAGGCGGACTGTGGTTACTCCTCGCGCCTATTATGGCATG |
| | | GACGTGTGGGGCCAAGGAACTACTGTGACTGTGAGCTCGGGAGGCGGTGGGTCAGGCGGAGGAGGGTCGGGCGGTGGTGG |
| | | CTCGGGAGGGGGAGGAAGCGACATTCAACTTACGCAGAGCCCGTCAACCCTGTCAGCGTCAGTGGGAGATCGGGTGACCA |
| | | TCACGTGTCAGGCCAGCCAGGATATCTCCAACTCGCTCAACTGGTACCAGCAAAAGGCGGGTAAAGCTCCGAAGCTGCTG |
| | | ATCTACGACGCTTCCACCCTCGAGACTGGAGTCCCATCCAGATTTTCCGGGTCAGGAAGCGGCACCGATTTCTCCTTCAC |
| | | CATTTCGTCCTTGCAACCGGAGGACATCGCAACCTACTACTGCCAGCAGCATGACAACTTGCCTCTGACGTTCGGGCAGG |
| | | GCACCAAGGTGGAAATCAAG |
| 476 | M2 | ATGGCCCTCCCTGTCACCGCCCTGCTGCTTCCGCTGGCTCTTCTGCTCCACGCCGCTCGGCCCCAAGTCCAACTCGTCCA |
| | (Full) | GTCAGGAGCAGAAGTCAAGAAACCAGGTGCTAGCGTGAAAGTGTCGTGCAAGGCGTCGGGATACACTTTCACCGGATACT |
| | >FA56- | AC |
| | 26RC | ATGCACTGGGTCCGCCAGGCCCCCGGACAAGGACTGGAATGGATGGGCTGGATCAACCCGAATAGCGGGGGAACTAATTA |
| | (M2) | CGCCCAGAAGTTTCAGGGACGAGTGACCATGACCCGCGATACCTCTATCTCGACCGCCTACATGGAGCTCTCCAGACTGC |
| | | GCTCCGACGATACTGCAGTGTACTACTGCGCCCGGGACCTGAGGCGGACTGTGGTTACTCCTCGCGCCTATTATGGCATG |
| | | GACGTGTGGGGCCAAGGAACTACTGTGACTGTGAGCTCGGGAGGCGGTGGGTCAGGCGGAGGAGGGTCGGGCGGTGGTGG |
| | | CTCGGGAGGGGGAGGAAGCGACATTCAACTTACGCAGAGCCCGTCAACCCTGTCAGCGTCAGTGGGAGATCGGGTGACCA |
| | | TCACGTGTCAGGCCAGCCAGGATATCTCCAACTCGCTCAACTGGTACCAGCAAAAGGCGGGTAAAGCTCCGAAGCTGCTG |
| | | ATCTACGACGCTTCCACCCTCGAGACTGGAGTCCCATCCAGATTTTCCGGGTCAGGAAGCGGCACCGATTTCTCCTTCAC |
| | | CATTTCGTCCTTGCAACCGGAGGACATCGCAACCTACTACTGCCAGCAGCATGACAACTTGCCTCTGACGTTCGGGCAGG |
| | | GCACCAAGGTGGAAATCAAGACCACTACCCCAGCACCGAGGCCACCCACCCCGGCTCCTACCATCGCCTCCCAGCCTCTG |
| | | TCCCTGCGTCCGGAGGCATGTAGACCCGCAGCTGGTGGGGCCGTGCATACCCGGGGTCTTGACTTCGCCTGCGATATCTA |
| | | CATTTGGGCCCCTCTGGCTGGTACTTGCGGGGTCCTGCTGCTTTCACTCGTGATCACTCTTTACTGTAAGCGCGGTCGGA |
| | | AGAAGCTGCTGTACATCTTTAAGCAACCCTTCATGAGGCCTGTGCAGACTACTCAAGAGGAGGACGGCTGTTCATGCCGG |
| | | TTCCCAGAGGAGGAGGAAGGCGGCTGCGAACTGCGCGTGAAATTCAGCCGCAGCGCAGATGCTCCAGCCTACAAGCAGGG |
| | | GCAGAACCAGCTCTACAACGAACTCAATCTTGGTCGGAGAGAGGAGTACGACGTGCTGGACAAGCGGAGAGGACGGGACC |
| | | CAGAAATGGGCGGGAAGCCGCGCAGAAAGAATCCCCAAGAGGGCCTGTACAACGAGCTCCAAAAGGATAAGATGGCAGAA |
| | | GCCTATAGCGAGATTGGTATGAAAGGGGAACGCAGAAGAGGCAAAGGCCACGACGGACTGTACCAGGGACTCAGCACCGC |
| | | CACCAAGGACACCTATGACGCTCTTCACATGCAGGCCCTGCCGCCTCGG |
| 477 | M3 | CAAGTCCAACTCGTCCAA |
| | (ScFv | TCAGGAGCGGAAGTCAAAAAGCCCGGAGCTCCAGTGAAAGTGTCATGCAAGGCCTCCGGCTACACCTTCACCGGTTACTA |
| | domain) | TATGCACTGGGTGCGGCAGGCCCCGGGCCAGGGGTTGGAATGGATGGGATGGATCAATCCAAACTCGGGTGGGACTAACT |
| | >VA58- | ACGCCCAGAAGTTCCAAGGACGGGTGACCATGACTAGGGACACCTCGATCTCCACCGCATACATGGAGCTTAGCAGACTC |
| | 21LC | CGCTCCGACGATACCGCAGTCTACTATTGCGCGCGGGGAGAGTGGGACGGATCGTACTACTACGATTACTGGGGCCAGGG |
| | (M3) | AACTCTGGTGACTGTTTCCTCGGGTGGAGGAGGTTCAGGCGGAGGCGGCTCGGGCGGGGGAGGATCTGGAGGAGGAGGGT |
| | | CCGACATTGTGCTGACCCAAACTCCTTCGTCCCTGTCGGCCAGCGTGGGCGACCGCGTGACGATTACGTGCAGAGCTAGC |
| | | CAATCCATCAATACTTACCTCAACTGGTACCAGCATAAGCCGGGGAAAGCACCAAAGCTGCTGATCTACGCCGCCTCATC |
| | | CTTGCAGAGCGGTGTGCCTTCACGCTTTAGCGGATCGGGATCGGGAACGGATTTCACCCTGACTATCAGCTCCCTCCAGC |
| | | CGGAGGATTTTGCGACCTACTACTGTCAGCAGAGCTTCTCACCGCTGACTTTCGGCGGCGGGACCAAGCTGGAAATCAAG |
| 478 | M3 | ATGGCCCTCCCTGTCACCGCCCTGCTGCTTCCGCTGGCTCTTCTGCTCCACGCCGCTCGGCCCCAAGTCCAACTCGTCCA |
| | (Full) | A |
| | >VA58- | TCAGGAGCGGAAGTCAAAAAGCCCGGAGCTCCAGTGAAAGTGTCATGCAAGGCCTCCGGCTACACCTTCACCGGTTACTA |
| | 21LC | TATGCACTGGGTGCGGCAGGCCCCGGGCCAGGGGTTGGAATGGATGGGATGGATCAATCCAAACTCGGGTGGGACTAACT |
| | (M3) | ACGCCCAGAAGTTCCAAGGACGGGTGACCATGACTAGGGACACCTCGATCTCCACCGCATACATGGAGCTTAGCAGACTC |
| | | CGCTCCGACGATACCGCAGTCTACTATTGCGCGCGGGGAGAGTGGGACGGATCGTACTACTACGATTACTGGGGCCAGGG |
| | | AACTCTGGTGACTGTTTCCTCGGGTGGAGGAGGTTCAGGCGGAGGCGGCTCGGGCGGGGGAGGATCTGGAGGAGGAGGGT |
| | | CCGACATTGTGCTGACCCAAACTCCTTCGTCCCTGTCGGCCAGCGTGGGCGACCGCGTGACGATTACGTGCAGAGCTAGC |
| | | CAATCCATCAATACTTACCTCAACTGGTACCAGCATAAGCCGGGGAAAGCACCAAAGCTGCTGATCTACGCCGCCTCATC |
| | | CTTGCAGAGCGGTGTGCCTTCACGCTTTAGCGGATCGGGATCGGGAACGGATTTCACCCTGACTATCAGCTCCCTCCAGC |
| | | CGGAGGATTTTGCGACCTACTACTGTCAGCAGAGCTTCTCACCGCTGACTTTCGGCGGCGGGACCAAGCTGGAAATCAAG |
| | | ACCACTACCCCAGCACCGAGGCCACCCACCCCGGCTCCTACCATCGCCTCCCAGCCTCTGTCCCTGCGTCCGGAGGCATG |
| | | TAGACCCGCAGCTGGTGGGGCCGTGCATACCCGGGGTCTTGACTTCGCCTGCGATATCTACATTTGGGCCCCTCTGGCTG |
| | | GTACTTGCGGGGTCCTGCTGCTTTCACTCGTGATCACTCTTTACTGTAAGCGCGGTCGGAAGAAGCTGCTGTACATCTTT |
| | | AAGCAACCCTTCATGAGGCCTGTGCAGACTACTCAAGAGGAGGACGGCTGTTCATGCCGGTTCCCAGAGGAGGAGGAAGG |
| | | CGGCTGCGAACTGCGCGTGAAATTCAGCCGCAGCGCAGATGCTCCAGCCTACAAGCAGGGGCAGAACCAGCTCTACAACG |
| | | AACTCAATCTTGGTCGGAGAGAGGAGTACGACGTGCTGGACAAGCGGAGAGGACGGGACCCAGAAATGGGCGGGAAGCCG |
| | | CGCAGAAAGAATCCCCAAGAGGGCCTGTACAACGAGCTCCAAAAGGATAAGATGGCAGAAGCCTATAGCGAGATTGGTAT |
| | | GAAAGGGGAACGCAGAAGAGGCAAAGGCCACGACGGACTGTACCAGGGACTCAGCACCGCCACCAAGGACACCTATGACG |
| | | CTCTTCACATGCAGGCCCTGCCGCCTCGG |
| 479 | M4 | CAAGTGCAACTCGTTGAA |
| | (ScFv | TCAGGTGGAGGTTTGGTGCAACCCGGAGGATCTCTCAGACTGTCGTGTGCGGCGTCCGGGTTCACCTTTTCGTCCTACTG |
| | domain) | GATGCACTGGGTGCGCCAGGTGCCGGGAAAAGGACTGGTGTGGGTGTCCAGAATCAACACCGACGGGTCAACGACTACCT |
| | >DP37- | ACGCAGATAGCGTGGAAGGTCGGTTCACCATTTCGCGGGACAACGCTAAAAACACTCTGTACCTTCAGATGAATTCACTG |
| | 07IC | CGCGATGACGACACCGCAGTCTACTACTGCGTCGGTGGACACTGGGCGGTCTGGGGACAGGGAACTACGGTGACTGTGTC |
| | (M4) | CAGCGGCGGGGGAGGAAGCGGCGGAGGGGGGAGCGGAGGCGGAGGATCAGGAGGAGGCGGCTCCGATATCCAGATGACCC |
| | | AGTCGCCATCGACCCTCTCCGCTAGCGTGGGGGATAGGGTCACTATCACTTGCCGAGCCAGCCAATCCATTAGCGACCGG |
| | | CTTGCCTGGTACCAACAGAAACCTGGAAAGGCCCCGAAGCTGCTCATCTACAAGGCCTCGTCACTGGAGTCGGGAGTCCC |
| | | GTCCCGCTTTTCCGGCTCGGGCTCAGGCACCGAGTTCACTCTGACCATCTCGAGCCTGCAGCCGGACGATTTCGCCGTGT |
| | | ATTACTGCCAGCAATACGGACATCTCCCAATGTACACGTTCGGTCAGGGCACCAAGGTCGAAATCAAG |
| 480 | M4 | ATGGCCCTCCCTGTCACCGCCCTGCTGCTTCCGCTGGCTCTTCTGCTCCACGCCGCTCGGCCCCAAGTGCAACTCGTTGA |
| | >DP37- | A |
| | 07IC | TCAGGTGGAGGTTTGGTGCAACCCGGAGGATCTCTCAGACTGTCGTGTGCGGCGTCCGGGTTCACCTTTTCGTCCTACTG |
| | (M4) | GATGCACTGGGTGCGCCAGGTGCCGGGAAAAGGACTGGTGTGGGTGTCCAGAATCAACACCGACGGGTCAACGACTACCT |
| | | ACGCAGATAGCGTGGAAGGTCGGTTCACCATTTCGCGGGACAACGCTAAAAACACTCTGTACCTTCAGATGAATTCACTG |
| | | CGCGATGACGACACCGCAGTCTACTACTGCGTCGGTGGACACTGGGCGGTCTGGGGACAGGGAACTACGGTGACTGTGTC |
| | | CAGCGGCGGGGGAGGAAGCGGCGGAGGGGGGAGCGGAGGCGGAGGATCAGGAGGAGGCGGCTCCGATATCCAGATGACCC |
| | | AGTCGCCATCGACCCTCTCCGCTAGCGTGGGGGATAGGGTCACTATCACTTGCCGAGCCAGCCAATCCATTAGCGACCGG |
| | | CTTGCCTGGTACCAACAGAAACCTGGAAAGGCCCCGAAGCTGCTCATCTACAAGGCCTCGTCACTGGAGTCGGGAGTCCC |
| | | GTCCCGCTTTTCCGGCTCGGGCTCAGGCACCGAGTTCACTCTGACCATCTCGAGCCTGCAGCCGGACGATTTCGCCGTGT |
| | | ATTACTGCCAGCAATACGGACATCTCCCAATGTACACGTTCGGTCAGGGCACCAAGGTCGAAATCAAGACCACTACCCCA |
| | | GCACCGAGGCCACCCACCCCGGCTCCTACCATCGCCTCCCAGCCTCTGTCCCTGCGTCCGGAGGCATGTAGACCCGCAGC |
| | | TGGTGGGGCCGTGCATACCCGGGGTCTTGACTTCGCCTGCGATATCTACATTTGGGCCCCTCTGGCTGGTACTTGCGGGG |
| | | TCCTGCTGCTTTCACTCGTGATCACTCTTTACTGTAAGCGCGGTCGGAAGAAGCTGCTGTACATCTTTAAGCAACCCTTC |
| | | ATGAGGCCTGTGCAGACTACTCAAGAGGAGGACGGCTGTTCATGCCGGTTCCCAGAGGAGGAGGAAGGCGGCTGCGAACT |
| | | GCGCGTGAAATTCAGCCGCAGCGCAGATGCTCCAGCCTACAAGCAGGGGCAGAACCAGCTCTACAACGAACTCAATCTTG |
| | | GTCGGAGAGAGGAGTACGACGTGCTGGACAAGCGGAGAGGACGGGACCCAGAAATGGGCGGGAAGCCGCGCAGAAAGAAT |
| | | CCCCAAGAGGGCCTGTACAACGAGCTCCAAAAGGATAAGATGGCAGAAGCCTATAGCGAGATTGGTATGAAAGGGGAACG |
| | | CAGAAGAGGCAAAGGCCACGACGGACTGTACCAGGGACTCAGCACCGCCACCAAGGACACCTATGACGCTCTTCACATGC |
| | | AGGCCCTGCCGCCTCGG |
| 481 | M5 | CAAGTCCAACTCGTTCAATCAGGCGCAGAAGTCGAAAAGCCCGGAGCATCAGTCAAAGTCTCTTGCAAGGCTTCCGGCTA |
| | (ScFv | CACCTTCACGGACTACTAC |
| | domain) | ATGCACTGGGTGCGCCAGGCTCCAGGCCAGGGACTGGAGTGGATGGGATGGATCAACCCGAATTCCGGGGGAACTAACTA |
| | >XP31- | CGCCCAGAAGTTTCAGGGCCGGGTGACTATGACTCGCGATACCTCGATCTCGACTGCGTACATGGAGCTCAGCCGCCTCC |
| | 20LC | GGTCGGACGATACCGCCGTGTACTATTGTGCGTCGGGATGGGACTTCGACTACTGGGGGCAGGGCACTCTGGTCACTGTG |
| | (M5) | TCAAGCGGAGGAGGTGGATCAGGTGGAGGTGGAAGCGGGGGAGGAGGTTCCGGCGGCGGAGGATCAGATATCGTGATGAC |
| | | GCAATCGCCTTCCTCGTTGTCCGCATCCGTGGGAGACAGGGTGACCATTACTTGCAGAGCGTCCCAGTCCATTCGGTACT |
| | | ACCTGTCGTGGTACCAGCAGAAGCCGGGGAAAGCCCCAAAACTGCTTATCTATACTGCCTCGATCCTCCAAAACGGCGTG |
| | | CCATCAAGATTCAGCGGTTCGGGCAGCGGGACCGACTTTACCCTGACTATCAGCAGCCTGCAGCCGGAAGATTTCGCCAC |
| | | GTACTACTGCCTGCAAACCTACACCACCCCGGACTTCGGACCTGGAACCAAGGTGGAGATCAAG |
| 482 | M5 | ATGGCCCTCCCTGTCACCGCCCTGCTGCTTCCGCTGGCTCTTCTGCTCCACGCCGCTCGGCCCCAAGTCCAACTCGTTCA |
| | (Full) | ATCAGGCGCAGAAGTCGAAAAGCCCGGAGCATCAGTCAAAGTCTCTTGCAAGGCTTCCGGCTACACCTTCACGGACTACT |
| | >XP31- | AC |
| | 20LC | ATGCACTGGGTGCGCCAGGCTCCAGGCCAGGGACTGGAGTGGATGGGATGGATCAACCCGAATTCCGGGGGAACTAACTA |
| | (M5) | CGCCCAGAAGTTTCAGGGCCGGGTGACTATGACTCGCGATACCTCGATCTCGACTGCGTACATGGAGCTCAGCCGCCTCC |
| | | GGTCGGACGATACCGCCGTGTACTATTGTGCGTCGGGATGGGACTTCGACTACTGGGGGCAGGGCACTCTGGTCACTGTG |
| | | TCAAGCGGAGGAGGTGGATCAGGTGGAGGTGGAAGCGGGGGAGGAGGTTCCGGCGGCGGAGGATCAGATATCGTGATGAC |
| | | GCAATCGCCTTCCTCGTTGTCCGCATCCGTGGGAGACAGGGTGACCATTACTTGCAGAGCGTCCCAGTCCATTCGGTACT |
| | | ACCTGTCGTGGTACCAGCAGAAGCCGGGGAAAGCCCCAAAACTGCTTATCTATACTGCCTCGATCCTCCAAAACGGCGTG |
| | | CCATCAAGATTCAGCGGTTCGGGCAGCGGGACCGACTTTACCCTGACTATCAGCAGCCTGCAGCCGGAAGATTTCGCCAC |
| | | GTACTACTGCCTGCAAACCTACACCACCCCGGACTTCGGACCTGGAACCAAGGTGGAGATCAAGACCACTACCCCAGCAC |
| | | CGAGGCCACCCACCCCGGCTCCTACCATCGCCTCCCAGCCTCTGTCCCTGCGTCCGGAGGCATGTAGACCCGCAGCTGGT |
| | | GGGGCCGTGCATACCCGGGGTCTTGACTTCGCCTGCGATATCTACATTTGGGCCCCTCTGGCTGGTACTTGCGGGGTCCT |
| | | GCTGCTTTCACTCGTGATCACTCTTTACTGTAAGCGCGGTCGGAAGAAGCTGCTGTACATCTTTAAGCAACCCTTCATGA |
| | | GGCCTGTGCAGACTACTCAAGAGGAGGACGGCTGTTCATGCCGGTTCCCAGAGGAGGAGGAAGGCGGCTGCGAACTGCGC |
| | | GTGAAATTCAGCCGCAGCGCAGATGCTCCAGCCTACAAGCAGGGGCAGAACCAGCTCTACAACGAACTCAATCTTGGTCG |
| | | GAGAGAGGAGTACGACGTGCTGGACAAGCGGAGAGGACGGGACCCAGAAATGGGCGGGAAGCCGCGCAGAAAGAATCCCC |
| | | AAGAGGGCCTGTACAACGAGCTCCAAAAGGATAAGATGGCAGAAGCCTATAGCGAGATTGGTATGAAAGGGGAACGCAGA |
| | | AGAGGCAAAGGCCACGACGGACTGTACCAGGGACTCAGCACCGCCACCAAGGACACCTATGACGCTCTTCACATGCAGGC |
| | | CCTGCCGCCTCGG |
| 483 | M6 | CAAGTGCAACTCGTCCAGTCAGGTGCAGAAGTGAAGAAACCCGGAGCGTCAGTCAAAGTGTCATGCAAGGCGTCAGGCTA |
| | (ScFv | CACCTTCACCAGCTACTAC |
| | domain) | ATGCACTGGGTGCGGCAGGCCCCAGGCCAAGGCTTGGAGTGGATGGGAATCATTAACCCGTCAGGAGGCTCCACCTCCTA |
| | >FE10- | CGCCCAGAAGTTTCAGGGAAGAGTGACGATGACTCGGGATACGTCGACCTCGACCGTGTACATGGAACTGAGCTCGCTGC |
| | 06ID | GCTCCGAGGACACTGCTGTGTACTACTGCGCACGGTACAGACTCATTGCCGTGGCAGGAGACTACTACTACTATGGCATG |
| | (M6) | GACGTCTGGGGGCAGGGCACTATGGTCACTGTGTCGTCCGGCGGAGGAGGCTCGGGTGGAGGAGGTAGCGGAGGAGGGGG |
| | | AAGCGGAGGGGGGGGCTCCGATATCCAGATGACTCAGTCGCCTTCCTCCGTGTCGGCCTCGGTTGGAGATCGCGTCACCA |
| | | TCACTTGTCGAGCTTCCCAAGGAGTCGGTAGGTGGCTGGCGTGGTACCAGCAAAAGCCGGGAACTGCCCCGAAGCTCCTG |
| | | ATCTACGCGGCTAGCACCCTGCAGTCGGGAGTGCCATCCCGCTTCAGCGGATCTGGGTCAGGTACCGACTTCACCCTTAC |
| | | GATCAACAATCTCCAGCCGGAGGACTTTGCCACCTATTACTGCCAACAGGCCAACAGCTTCCCTCTGACTTTCGGAGGGG |
| | | GCACTCGCCTGGAAATCAAG |
| 484 | M6 | ATGGCCCTCCCTGTCACCGCCCTGCTGCTTCCGCTGGCTCTTCTGCTCCACGCCGCTCGGCCCCAAGTGCAACTCGTCCA |
| | (Full) | GTCAGGTGCAGAAGTGAAGAAACCCGGAGCGTCAGTCAAAGTGTCATGCAAGGCGTCAGGCTACACCTTCACCAGCTACT |
| | >FE10- | AC |
| | 06ID | ATGCACTGGGTGCGGCAGGCCCCAGGCCAAGGCTTGGAGTGGATGGGAATCATTAACCCGTCAGGAGGCTCCACCTCCTA |
| | (M6) | CGCCCAGAAGTTTCAGGGAAGAGTGACGATGACTCGGGATACGTCGACCTCGACCGTGTACATGGAACTGAGCTCGCTGC |
| | | GCTCCGAGGACACTGCTGTGTACTACTGCGCACGGTACAGACTCATTGCCGTGGCAGGAGACTACTACTACTATGGCATG |
| | | GACGTCTGGGGGCAGGGCACTATGGTCACTGTGTCGTCCGGCGGAGGAGGCTCGGGTGGAGGAGGTAGCGGAGGAGGGGG |
| | | AAGCGGAGGGGGGGGCTCCGATATCCAGATGACTCAGTCGCCTTCCTCCGTGTCGGCCTCGGTTGGAGATCGCGTCACCA |
| | | TCACTTGTCGAGCTTCCCAAGGAGTCGGTAGGTGGCTGGCGTGGTACCAGCAAAAGCCGGGAACTGCCCCGAAGCTCCTG |
| | | ATCTACGCGGCTAGCACCCTGCAGTCGGGAGTGCCATCCCGCTTCAGCGGATCTGGGTCAGGTACCGACTTCACCCTTAC |
| | | GATCAACAATCTCCAGCCGGAGGACTTTGCCACCTATTACTGCCAACAGGCCAACAGCTTCCCTCTGACTTTCGGAGGGG |
| | | GCACTCGCCTGGAAATCAAGACCACTACCCCAGCACCGAGGCCACCCACCCCGGCTCCTACCATCGCCTCCCAGCCTCTG |
| | | TCCCTGCGTCCGGAGGCATGTAGACCCGCAGCTGGTGGGGCCGTGCATACCCGGGGTCTTGACTTCGCCTGCGATATCTA |
| | | CATTTGGGCCCCTCTGGCTGGTACTTGCGGGGTCCTGCTGCTTTCACTCGTGATCACTCTTTACTGTAAGCGCGGTCGGA |
| | | AGAAGCTGCTGTACATCTTTAAGCAACCCTTCATGAGGCCTGTGCAGACTACTCAAGAGGAGGACGGCTGTTCATGCCGG |
| | | TTCCCAGAGGAGGAGGAAGGCGGCTGCGAACTGCGCGTGAAATTCAGCCGCAGCGCAGATGCTCCAGCCTACAAGCAGGG |
| | | GCAGAACCAGCTCTACAACGAACTCAATCTTGGTCGGAGAGAGGAGTACGACGTGCTGGACAAGCGGAGAGGACGGGACC |
| | | CAGAAATGGGCGGGAAGCCGCGCAGAAAGAATCCCCAAGAGGGCCTGTACAACGAGCTCCAAAAGGATAAGATGGCAGAA |
| | | GCCTATAGCGAGATTGGTATGAAAGGGGAACGCAGAAGAGGCAAAGGCCACGACGGACTGTACCAGGGACTCAGCACCGC |
| | | CACCAAGGACACCTATGACGCTCTTCACATGCAGGCCCTGCCGCCTCGG |
| 485 | M7 | CAAGTGCAATTGGTTCAA |
| | (ScFv | TCAGGAGGAGGAGTGGTGCAACCTGGAAGATCTCTCAGACTGTCGTGTGCGGCATCGGGATTCACTTTCTCATCATACGC |
| | domain) | AATGCACTGGGTCCGCCAGGCCCCGGGCAAAGGCTTGGAATGGGTGGCGGTCATTTCATACGACGGCTCGAACAAGTACT |
| | >VE12- | ACGCTGACAGCGTGAAGGGACGCTTTACTATTTCCCGGGACAATTCGAAGAACACTCTGTACCTCCAGATGAACTCCCTT |
| | 01CD | AGGGCTGAGGACACCGCCGTCTACTACTGCGCACGCTGGAAAGTGTCGTCCAGCTCCCCAGCTTTTGACTACTGGGGACA |
| | (M7) | GGGAACCCTTGTGACCGTGTCGTCCGGTGGAGGGGGAAGCGGCGGAGGGGGATCAGGTGGCGGCGGATCGGGAGGCGGGG |
| | | GATCAGAAATCGTGCTGACTCAGTCCCCGGCCACGCTGTCTCTCAGCCCGGGAGAGAGAGCGATCCTGTCCTGCCGCGCC |
| | | TCGCAGAGCGTGTACACTAAGTACCTGGGGTGGTACCAGCAGAAACCGGGTCAAGCGCCTCGGCTGCTGATCTACGATGC |
| | | CTCCACCCGGGCCACCGGAATCCCCGATCGGTTCTCCGGCAGCGGCTCGGGAACTGATTTCACGCTGACCATCAATCGCC |
| | | TGGAGCCGGAAGATTTCGCCGTCTATTACTGCCAGCATTACGGCGGGAGCCCACTCATCACCTTCGGTCAAGGAACCCGA |
| | | CTCGAAATCAAG |
| 486 | M7 | ATGGCCCTCCCTGTCACCGCCCTGCTGCTTCCGCTGGCTCTTCTGCTCCACGCCGCTCGGCCCCAAGTGCAATTGGTTCA |
| | (Full) | A |
| | >VE12- | TCAGGAGGAGGAGTGGTGCAACCTGGAAGATCTCTCAGACTGTCGTGTGCGGCATCGGGATTCACTTTCTCATCATACGC |
| | 01CD | AATGCACTGGGTCCGCCAGGCCCCGGGCAAAGGCTTGGAATGGGTGGCGGTCATTTCATACGACGGCTCGAACAAGTACT |
| | (M7) | ACGCTGACAGCGTGAAGGGACGCTTTACTATTTCCCGGGACAATTCGAAGAACACTCTGTACCTCCAGATGAACTCCCTT |
| | | AGGGCTGAGGACACCGCCGTCTACTACTGCGCACGCTGGAAAGTGTCGTCCAGCTCCCCAGCTTTTGACTACTGGGGACA |
| | | GGGAACCCTTGTGACCGTGTCGTCCGGTGGAGGGGGAAGCGGCGGAGGGGGATCAGGTGGCGGCGGATCGGGAGGCGGGG |
| | | GATCAGAAATCGTGCTGACTCAGTCCCCGGCCACGCTGTCTCTCAGCCCGGGAGAGAGAGCGATCCTGTCCTGCCGCGCC |
| | | TCGCAGAGCGTGTACACTAAGTACCTGGGGTGGTACCAGCAGAAACCGGGTCAAGCGCCTCGGCTGCTGATCTACGATGC |
| | | CTCCACCCGGGCCACCGGAATCCCCGATCGGTTCTCCGGCAGCGGCTCGGGAACTGATTTCACGCTGACCATCAATCGCC |
| | | TGGAGCCGGAAGATTTCGCCGTCTATTACTGCCAGCATTACGGCGGGAGCCCACTCATCACCTTCGGTCAAGGAACCCGA |
| | | CTCGAAATCAAGACCACTACCCCAGCACCGAGGCCACCCACCCCGGCTCCTACCATCGCCTCCCAGCCTCTGTCCCTGCG |
| | | TCCGGAGGCATGTAGACCCGCAGCTGGTGGGGCCGTGCATACCCGGGGTCTTGACTTCGCCTGCGATATCTACATTTGGG |
| | | CCCCTCTGGCTGGTACTTGCGGGGTCCTGCTGCTTTCACTCGTGATCACTCTTTACTGTAAGCGCGGTCGGAAGAAGCTG |
| | | CTGTACATCTTTAAGCAACCCTTCATGAGGCCTGTGCAGACTACTCAAGAGGAGGACGGCTGTTCATGCCGGTTCCCAGA |
| | | GGAGGAGGAAGGCGGCTGCGAACTGCGCGTGAAATTCAGCCGCAGCGCAGATGCTCCAGCCTACAAGCAGGGGCAGAACC |
| | | AGCTCTACAACGAACTCAATCTTGGTCGGAGAGAGGAGTACGACGTGCTGGACAAGCGGAGAGGACGGGACCCAGAAATG |
| | | GGCGGGAAGCCGCGCAGAAAGAATCCCCAAGAGGGCCTGTACAACGAGCTCCAAAAGGATAAGATGGCAGAAGCCTATAG |
| | | CGAGATTGGTATGAAAGGGGAACGCAGAAGAGGCAAAGGCCACGACGGACTGTACCAGGGACTCAGCACCGCCACCAAGG |
| | | ACACCTATGACGCTCTTCACATGCAGGCCCTGCCGCCTCGG |
| 487 | M8 | CAAGTCCAACTCCAGCAG |
| | (ScFv | TCAGGTGCAGAAGTCAAAAAGCCAGGAGCATCCGTGAAGGTTTCGTGCAAGACTTCCGGCTACCCTTTTACCGGGTACTC |
| | domain) | CCTCCATTGGGTGAGACAAGCACCGGGCCAGGGACTGGAGTGGATGGGATGGATCAACCCAAATTCGGGCGGCACCAACT |
| | >LE13- | ATGCGCAGAAGTTCCAGGGACGGGTGACCATGACTCGCGACACTTCGATCTCCACTGCCTACATGGAGCTGTCCCGCTTG |
| | 05XD | AGATCTGACGACACGGCCGTCTACTACTGCGCCCGGGATCACTACGGAGGTAATTCGCTGTTCTACTGGGGGCAGGGAAC |
| | (M8) | CCTTGTGACTGTGTCCTCGGGTGGTGGAGGGTCAGGAGGCGGAGGCTCAGGGGGAGGAGGTAGCGGAGGAGGCGGATCAG |
| | | ACATCCAACTGACCCAGTCACCATCCTCCATCTCGGCTAGCGTCGGAGACACCGTGTCGATTACTTGTAGGGCCTCCCAA |
| | | GACTCAGGGACGTGGCTGGCGTGGTATCAGCAAAAACCGGGCAAAGCTCCGAACCTGTTGATGTACGACGCCAGCACCCT |
| | | CGAAGATGGAGTGCCTAGCCGCTTCAGCGGAAGCGCCTCGGGCACTGAATTCACGCTGACTGTGAATCGGCTCCAGCCGG |
| | | AGGATTCGGCGACCTACTACTGCCAGCAGTACAACAGCTACCCCCTGACCTTTGGAGGCGGGACCAAGGTGGATATCAAG |
| 488 | M8 | ATGGCCCTCCCTGTCACCGCCCTGCTGCTTCCGCTGGCTCTTCTGCTCCACGCCGCTCGGCCCCAAGTCCAACTCCAGCA |
| | (Full) | G |
| | >LE13- | TCAGGTGCAGAAGTCAAAAAGCCAGGAGCATCCGTGAAGGTTTCGTGCAAGACTTCCGGCTACCCTTTTACCGGGTACTC |
| | 05XD | CCTCCATTGGGTGAGACAAGCACCGGGCCAGGGACTGGAGTGGATGGGATGGATCAACCCAAATTCGGGCGGCACCAACT |
| | (M8) | ATGCGCAGAAGTTCCAGGGACGGGTGACCATGACTCGCGACACTTCGATCTCCACTGCCTACATGGAGCTGTCCCGCTTG |
| | | AGATCTGACGACACGGCCGTCTACTACTGCGCCCGGGATCACTACGGAGGTAATTCGCTGTTCTACTGGGGGCAGGGAAC |
| | | CCTTGTGACTGTGTCCTCGGGTGGTGGAGGGTCAGGAGGCGGAGGCTCAGGGGGAGGAGGTAGCGGAGGAGGCGGATCAG |
| | | ACATCCAACTGACCCAGTCACCATCCTCCATCTCGGCTAGCGTCGGAGACACCGTGTCGATTACTTGTAGGGCCTCCCAA |
| | | GACTCAGGGACGTGGCTGGCGTGGTATCAGCAAAAACCGGGCAAAGCTCCGAACCTGTTGATGTACGACGCCAGCACCCT |
| | | CGAAGATGGAGTGCCTAGCCGCTTCAGCGGAAGCGCCTCGGGCACTGAATTCACGCTGACTGTGAATCGGCTCCAGCCGG |
| | | AGGATTCGGCGACCTACTACTGCCAGCAGTACAACAGCTACCCCCTGACCTTTGGAGGCGGGACCAAGGTGGATATCAAG |
| | | ACCACTACCCCAGCACCGAGGCCACCCACCCCGGCTCCTACCATCGCCTCCCAGCCTCTGTCCCTGCGTCCGGAGGCATG |
| | | TAGACCCGCAGCTGGTGGGGCCGTGCATACCCGGGGTCTTGACTTCGCCTGCGATATCTACATTTGGGCCCCTCTGGCTG |
| | | GTACTTGCGGGGTCCTGCTGCTTTCACTCGTGATCACTCTTTACTGTAAGCGCGGTCGGAAGAAGCTGCTGTACATCTTT |
| | | AAGCAACCCTTCATGAGGCCTGTGCAGACTACTCAAGAGGAGGACGGCTGTTCATGCCGGTTCCCAGAGGAGGAGGAAGG |
| | | CGGCTGCGAACTGCGCGTGAAATTCAGCCGCAGCGCAGATGCTCCAGCCTACAAGCAGGGGCAGAACCAGCTCTACAACG |
| | | AACTCAATCTTGGTCGGAGAGAGGAGTACGACGTGCTGGACAAGCGGAGAGGACGGGACCCAGAAATGGGCGGGAAGCCG |
| | | CGCAGAAAGAATCCCCAAGAGGGCCTGTACAACGAGCTCCAAAAGGATAAGATGGCAGAAGCCTATAGCGAGATTGGTAT |
| | | GAAAGGGGAACGCAGAAGAGGCAAAGGCCACGACGGACTGTACCAGGGACTCAGCACCGCCACCAAGGACACCTATGACG |
| | | CTCTTCACATGCAGGCCCTGCCGCCTCGG |
| 489 | M9 | CAAGTGCAACTCGTCCAG |
| | (ScFv | TCAGGTGCAGAAGTGAAGAAACCAGGAGCGTCCGTCGAAGTGTCGTGTAAGGCGTCCGGCTACACTTTCACCTCGTACTA |
| | domain) | CATGCACTGGGTGCGGCAGGCCCCGGGACAAGGCCTCGAATGGATGGGAATCATCAACCCGAGCGGAGGCTCGACTGGTT |
| | >BE15- | ACGCCCAGAAGTTCCAGGGAAGGGTGACGATGACCCGCGATACCTCGACTTCGACCGTTCATATGGAGCTCTCGTCCCTG |
| | 00SD | CGGAGCGAGGACACTGCTGTCTACTATTGCGCGCGGGGAGGATACTCTAGCTCCTCCGATGCATTTGACATTTGGGGCCA |
| | (M9) | GGGAACTATGGTGACCGTGTCATCAGGCGGAGGTGGATCAGGAGGAGGAGGGTCGGGAGGGGGAGGCAGCGGCGGGGGTG |
| | | GGTCGGACATTCAGATGACGCAGTCCCCTCCTAGCCTGAGCGCCTCGGTGGGTGACAGAGTGACCATCACTTGCAGAGCC |
| | | TCGCAAGACATCTCCTCCGCATTGGCTTGGTACCAGCAAAAGCCGGGCACTCCGCCGAAACTGCTCATCTACGATGCCTC |
| | | CTCACTGGAGTCAGGAGTCCCATCTCGCTTCTCGGGGTCAGGAAGCGGCACCGATTTTACCCTTACCATCTCCAGCCTGC |
| | | AGCCCGAGGACTTCGCCACGTACTACTGCCAACAGTTCAGCTCCTACCCACTGACCTTCGGGGGCGGAACTCGCCTGGAA |
| | | ATCAAG |
| 490 | M9 | ATGGCCCTCCCTGTCACCGCCCTGCTGCTTCCGCTGGCTCTTCTGCTCCACGCCGCTCGGCCCCAAGTGCAACTCGTCCA |
| | (Full) | G |
| | >BE15- | TCAGGTGCAGAAGTGAAGAAACCAGGAGCGTCCGTCGAAGTGTCGTGTAAGGCGTCCGGCTACACTTTCACCTCGTACTA |
| | 00SD | CATGCACTGGGTGCGGCAGGCCCCGGGACAAGGCCTCGAATGGATGGGAATCATCAACCCGAGCGGAGGCTCGACTGGTT |
| | (M9) | ACGCCCAGAAGTTCCAGGGAAGGGTGACGATGACCCGCGATACCTCGACTTCGACCGTTCATATGGAGCTCTCGTCCCTG |
| | | CGGAGCGAGGACACTGCTGTCTACTATTGCGCGCGGGGAGGATACTCTAGCTCCTCCGATGCATTTGACATTTGGGGCCA |
| | | GGGAACTATGGTGACCGTGTCATCAGGCGGAGGTGGATCAGGAGGAGGAGGGTCGGGAGGGGGAGGCAGCGGCGGGGGTG |
| | | GGTCGGACATTCAGATGACGCAGTCCCCTCCTAGCCTGAGCGCCTCGGTGGGTGACAGAGTGACCATCACTTGCAGAGCC |
| | | TCGCAAGACATCTCCTCCGCATTGGCTTGGTACCAGCAAAAGCCGGGCACTCCGCCGAAACTGCTCATCTACGATGCCTC |
| | | CTCACTGGAGTCAGGAGTCCCATCTCGCTTCTCGGGGTCAGGAAGCGGCACCGATTTTACCCTTACCATCTCCAGCCTGC |
| | | AGCCCGAGGACTTCGCCACGTACTACTGCCAACAGTTCAGCTCCTACCCACTGACCTTCGGGGGCGGAACTCGCCTGGAA |
| | | ATCAAGACCACTACCCCAGCACCGAGGCCACCCACCCCGGCTCCTACCATCGCCTCCCAGCCTCTGTCCCTGCGTCCGGA |
| | | GGCATGTAGACCCGCAGCTGGTGGGGCCGTGCATACCCGGGGTCTTGACTTCGCCTGCGATATCTACATTTGGGCCCCTC |
| | | TGGCTGGTACTTGCGGGGTCCTGCTGCTTTCACTCGTGATCACTCTTTACTGTAAGCGCGGTCGGAAGAAGCTGCTGTAC |
| | | ATCTTTAAGCAACCCTTCATGAGGCCTGTGCAGACTACTCAAGAGGAGGACGGCTGTTCATGCCGGTTCCCAGAGGAGGA |
| | | GGAAGGCGGCTGCGAACTGCGCGTGAAATTCAGCCGCAGCGCAGATGCTCCAGCCTACAAGCAGGGGCAGAACCAGCTCT |
| | | ACAACGAACTCAATCTTGGTCGGAGAGAGGAGTACGACGTGCTGGACAAGCGGAGAGGACGGGACCCAGAAATGGGCGGG |
| | | AAGCCGCGCAGAAAGAATCCCCAAGAGGGCCTGTACAACGAGCTCCAAAAGGATAAGATGGCAGAAGCCTATAGCGAGAT |
| | | TGGTATGAAAGGGGAACGCAGAAGAGGCAAAGGCCACGACGGACTGTACCAGGGACTCAGCACCGCCACCAAGGACACCT |
| | | ATGACGCTCTTCACATGCAGGCCCTGCCGCCTCGG |
| 491 | M10 | CAAGTGCAACTCGTCCAGAGCGGAGCAGAAGTCAAGAAGCCAGGAGCGTCAGTGAAAGTGTCATGCAAGGCCAGCGGCTA |
| | (ScFv | TACCTTTACTTCGTATGGG |
| | domain) | ATCTCCTGGGTGCGGCAGGCACCGGGCCAAGGACTGGAGTGGATGGGATGGATCTCAGCCTACAACGGTAACACCAACTA |
| | >RE16- | CGCCCAGAAGCTGCAAGGACGCGTGACCATGACTACTGATACGAGCACCTCCACTGCCTACATGGAATTGCGGTCCCTTC |
| | 05MD | GGTCGGACGATACTGCTGTGTACTACTGCGCAAGAGTCGCCGGAGGGATCTACTACTACTACGGCATGGACGTCTGGGGA |
| | (M10) | CAGGGAACCACCATTACGGTGTCGAGCGGAGGGGGAGGCTCGGGGGGAGGAGGAAGCGGAGGTGGCGGCTCCGGGGGCGG |
| | | CGGATCGGACATTGTGATGACCCAGACTCCTGACTCCCTGGCTGTTTCGTTGGGAGAGCGCGCGACTATCTCGTGTAAGT |
| | | CCAGCCACTCAGTCCTGTACAATCGCAATAACAAGAACTACCTCGCGTGGTACCAGCAAAAACCGGGTCAGCCGCCTAAA |
| | | CTCCTGTTCTACTGGGCCTCCACCAGAAAGAGCGGGGTGCCAGATCGATTCTCTGGATCAGGATCAGGTACCGACTTTAC |
| | | GCTGACCATCTCGTCCCTGCAGCCGGAGGATTTCGCGACTTACTTCTGCCAGCAGACTCAGACTTTCCCCCTCACCTTCG |
| | | GTCAAGGCACCAGGCTGGAAATCAAT |
| 492 | M10 | ATGGCCCTCCCTGTCACCGCCCTGCTGCTTCCGCTGGCTCTTCTGCTCCACGCCGCTCGGCCCCAAGTGCAACTCGTCCA |
| | (Full) | GAGCGGAGCAGAAGTCAAGAAGCCAGGAGCGTCAGTGAAAGTGTCATGCAAGGCCAGCGGCTATACCTTTACTTCGTATG |
| | >RE16- | GG |
| | 05MD | ATCTCCTGGGTGCGGCAGGCACCGGGCCAAGGACTGGAGTGGATGGGATGGATCTCAGCCTACAACGGTAACACCAACTA |
| | (M10) | CGCCCAGAAGCTGCAAGGACGCGTGACCATGACTACTGATACGAGCACCTCCACTGCCTACATGGAATTGCGGTCCCTTC |
| | | GGTCGGACGATACTGCTGTGTACTACTGCGCAAGAGTCGCCGGAGGGATCTACTACTACTACGGCATGGACGTCTGGGGA |
| | | CAGGGAACCACCATTACGGTGTCGAGCGGAGGGGGAGGCTCGGGGGGAGGAGGAAGCGGAGGTGGCGGCTCCGGGGGCGG |
| | | CGGATCGGACATTGTGATGACCCAGACTCCTGACTCCCTGGCTGTTTCGTTGGGAGAGCGCGCGACTATCTCGTGTAAGT |
| | | CCAGCCACTCAGTCCTGTACAATCGCAATAACAAGAACTACCTCGCGTGGTACCAGCAAAAACCGGGTCAGCCGCCTAAA |
| | | CTCCTGTTCTACTGGGCCTCCACCAGAAAGAGCGGGGTGCCAGATCGATTCTCTGGATCAGGATCAGGTACCGACTTTAC |
| | | GCTGACCATCTCGTCCCTGCAGCCGGAGGATTTCGCGACTTACTTCTGCCAGCAGACTCAGACTTTCCCCCTCACCTTCG |
| | | GTCAAGGCACCAGGCTGGAAATCAATACCACTACCCCAGCACCGAGGCCACCCACCCCGGCTCCTACCATCGCCTCCCAG |
| | | CCTCTGTCCCTGCGTCCGGAGGCATGTAGACCCGCAGCTGGTGGGGCCGTGCATACCCGGGGTCTTGACTTCGCCTGCGA |
| | | TATCTACATTTGGGCCCCTCTGGCTGGTACTTGCGGGGTCCTGCTGCTTTCACTCGTGATCACTCTTTACTGTAAGCGCG |
| | | GTCGGAAGAAGCTGCTGTACATCTTTAAGCAACCCTTCATGAGGCCTGTGCAGACTACTCAAGAGGAGGACGGCTGTTCA |
| | | TGCCGGTTCCCAGAGGAGGAGGAAGGCGGCTGCGAACTGCGCGTGAAATTCAGCCGCAGCGCAGATGCTCCAGCCTACAA |
| | | GCAGGGGCAGAACCAGCTCTACAACGAACTCAATCTTGGTCGGAGAGAGGAGTACGACGTGCTGGACAAGCGGAGAGGAC |
| | | GGGACCCAGAAATGGGCGGGAAGCCGCGCAGAAAGAATCCCCAAGAGGGCCTGTACAACGAGCTCCAAAAGGATAAGATG |
| | | GCAGAAGCCTATAGCGAGATTGGTATGAAAGGGGAACGCAGAAGAGGCAAAGGCCACGACGGACTGTACCAGGGACTCAG |
| | | CACCGCCACCAAGGACACCTATGACGCTCTTCACATGCAGGCCCTGCCGCCTCGG |
| 493 | M11 | CAAGTCCAATTGCAGCAGAGCGGAGCAGAAGTGAAGAAGCCAGGAGCGTCAGTCAAAGTGTCGTGTAAGGCGTCAGGATA |
| | (ScFv | CACCTTCACGGGATACTAC |
| | domain) | ATGCACTGGGTGCGCCAGGCCCCGGGCCAAGGACTCGAGTGGATGGGCTGGATCAACCCTAACTCTGGAGGCACCAACTA |
| | >NE10- | CGCCCAGAATTTCCAAGGCAGAGTGACCATGACCCGGGACACCTCCATCTCGACTGCCTATATGGAACTGCGGCGGCTGC |
| | 19WD | GCTCGGACGATACTGCTGTGTATTACTGCGCCAGCGGCTGGGACTTTGACTACTGGGGACAGGGTACTCTGGTGACTGTT |
| | (M11) | TCCTCGGGAGGAGGCGGATCGGGTGGAGGAGGTAGCGGGGGAGGGGGGTCGGGAGGCGGAGGCAGCGATATTCGCATGAC |
| | | TCAATCGCCGTCCTCCCTGAGCGCTAGCGTGGGAGATCGAGTCACCATCACTTGCAGAGCGTCACAGTCGATTCGCTACT |
| | | ACCTGTCCTGGTACCAGCAGAAACCGGGAAAGGCACCAAAGCTTCTGATCTACACGGCCTCCATCCTGCAAAATGGTGTC |
| | | CCATCAAGGTTCTCCGGGTCAGGGAGCGGCACTGACTTCACTCTCACCATCTCCTCACTCCAGCCCGAGGACTTTGCAAC |
| | | CTACTACTGCCTCCAGACGTACACCACCCCGGATTTCGGTCCTGGAACCAAGGTGGAAATCAAA |
| 494 | M11 | ATGGCCCTCCCTGTCACCGCCCTGCTGCTTCCGCTGGCTCTTCTGCTCCACGCCGCTCGGCCCCAAGTCCAATTGCAGCA |
| | (Full) | GAGCGGAGCAGAAGTGAAGAAGCCAGGAGCGTCAGTCAAAGTGTCGTGTAAGGCGTCAGGATACACCTTCACGGGATACT |
| | >NE10- | AC |
| | 19WD | ATGCACTGGGTGCGCCAGGCCCCGGGCCAAGGACTCGAGTGGATGGGCTGGATCAACCCTAACTCTGGAGGCACCAACTA |
| | (M11) | CGCCCAGAATTTCCAAGGCAGAGTGACCATGACCCGGGACACCTCCATCTCGACTGCCTATATGGAACTGCGGCGGCTGC |
| | | GCTCGGACGATACTGCTGTGTATTACTGCGCCAGCGGCTGGGACTTTGACTACTGGGGACAGGGTACTCTGGTGACTGTT |
| | | TCCTCGGGAGGAGGCGGATCGGGTGGAGGAGGTAGCGGGGGAGGGGGGTCGGGAGGCGGAGGCAGCGATATTCGCATGAC |
| | | TCAATCGCCGTCCTCCCTGAGCGCTAGCGTGGGAGATCGAGTCACCATCACTTGCAGAGCGTCACAGTCGATTCGCTACT |
| | | ACCTGTCCTGGTACCAGCAGAAACCGGGAAAGGCACCAAAGCTTCTGATCTACACGGCCTCCATCCTGCAAAATGGTGTC |
| | | CCATCAAGGTTCTCCGGGTCAGGGAGCGGCACTGACTTCACTCTCACCATCTCCTCACTCCAGCCCGAGGACTTTGCAAC |
| | | CTACTACTGCCTCCAGACGTACACCACCCCGGATTTCGGTCCTGGAACCAAGGTGGAAATCAAAACCACTACCCCAGCAC |
| | | CGAGGCCACCCACCCCGGCTCCTACCATCGCCTCCCAGCCTCTGTCCCTGCGTCCGGAGGCATGTAGACCCGCAGCTGGT |
| | | GGGGCCGTGCATACCCGGGGTCTTGACTTCGCCTGCGATATCTACATTTGGGCCCCTCTGGCTGGTACTTGCGGGGTCCT |
| | | GCTGCTTTCACTCGTGATCACTCTTTACTGTAAGCGCGGTCGGAAGAAGCTGCTGTACATCTTTAAGCAACCCTTCATGA |
| | | GGCCTGTGCAGACTACTCAAGAGGAGGACGGCTGTTCATGCCGGTTCCCAGAGGAGGAGGAAGGCGGCTGCGAACTGCGC |
| | | GTGAAATTCAGCCGCAGCGCAGATGCTCCAGCCTACAAGCAGGGGCAGAACCAGCTCTACAACGAACTCAATCTTGGTCG |
| | | GAGAGAGGAGTACGACGTGCTGGACAAGCGGAGAGGACGGGACCCAGAAATGGGCGGGAAGCCGCGCAGAAAGAATCCCC |
| | | AAGAGGGCCTGTACAACGAGCTCCAAAAGGATAAGATGGCAGAAGCCTATAGCGAGATTGGTATGAAAGGGGAACGCAGA |
| | | AGAGGCAAAGGCCACGACGGACTGTACCAGGGACTCAGCACCGCCACCAAGGACACCTATGACGCTCTTCACATGCAGGC |
| | | CCTGCCGCCTCGG |
| 495 | M12 | CAAGTCCAACTCGTCCAA |
| | (ScFv | AGCGGAGCAGAAGTCAAAAAGCCAGGAGCGTCGGTGAAAGTGTCTTGCAAAGCCAGCGGCTACACCTTCACGGGTTACTA |
| | domain) | CATGCACTGGGTGCGCCAGGCGCCGGGCCAGGGGCTGGAGTGGATGGGCCGGATTAACCCTAACAGCGGGGGAACTAATT |
| | >DE12- | ACGCTCAGAAGTTCCAGGGTAGAGTCACCATGACTACGGACACTTCCACTTCCACCGCCTATATGGAACTGCGCTCCCTC |
| | 14RD | CGCTCAGATGATACTGCCGTGTATTACTGCGCGCGGACTACCACGTCATACGCATTTGACATCTGGGGCCAGGGAACTAT |
| | (M12) | GGTGACCGTGAGCTCGGGCGGAGGCGGTTCAGGGGGAGGAGGAAGCGGAGGAGGAGGATCGGGAGGAGGTGGCTCCGATA |
| | | TCCAGCTGACTCAGTCCCCGAGCACCCTGTCGGCGTCGGTGGGGGACAGGGTTACCATCACCTGTAGAGCTTCCCAATCC |
| | | ATTTCGACTTGGCTGGCCTGGTACCAGCAAAAGCCGGGAAAGGCCCCTAATTTGCTTATCTACAAGGCATCGACCCTCGA |
| | | AAGCGGTGTGCCCTCCCGGTTTTCGGGATCAGGATCAGGGACCGAGTTCACCCTGACCATCTCATCCCTCCAGCCGGACG |
| | | ACTTCGCCACTTACTACTGCCAGCAGTACAACACCTACTCGCCATACACTTTCGGCCAAGGCACCAAGCTGGAGATCAAG |
| 496 | M12 | ATGGCCCTCCCTGTCACCGCCCTGCTGCTTCCGCTGGCTCTTCTGCTCCACGCCGCTCGGCCCCAAGTCCAACTCGTCCA |
| | (Full) | A |
| | >DE12- | AGCGGAGCAGAAGTCAAAAAGCCAGGAGCGTCGGTGAAAGTGTCTTGCAAAGCCAGCGGCTACACCTTCACGGGTTACTA |
| | 14RD | CATGCACTGGGTGCGCCAGGCGCCGGGCCAGGGGCTGGAGTGGATGGGCCGGATTAACCCTAACAGCGGGGGAACTAATT |
| | (M12) | ACGCTCAGAAGTTCCAGGGTAGAGTCACCATGACTACGGACACTTCCACTTCCACCGCCTATATGGAACTGCGCTCCCTC |
| | | CGCTCAGATGATACTGCCGTGTATTACTGCGCGCGGACTACCACGTCATACGCATTTGACATCTGGGGCCAGGGAACTAT |
| | | GGTGACCGTGAGCTCGGGCGGAGGCGGTTCAGGGGGAGGAGGAAGCGGAGGAGGAGGATCGGGAGGAGGTGGCTCCGATA |
| | | TCCAGCTGACTCAGTCCCCGAGCACCCTGTCGGCGTCGGTGGGGGACAGGGTTACCATCACCTGTAGAGCTTCCCAATCC |
| | | ATTTCGACTTGGCTGGCCTGGTACCAGCAAAAGCCGGGAAAGGCCCCTAATTTGCTTATCTACAAGGCATCGACCCTCGA |
| | | AAGCGGTGTGCCCTCCCGGTTTTCGGGATCAGGATCAGGGACCGAGTTCACCCTGACCATCTCATCCCTCCAGCCGGACG |
| | | ACTTCGCCACTTACTACTGCCAGCAGTACAACACCTACTCGCCATACACTTTCGGCCAAGGCACCAAGCTGGAGATCAAG |
| | | ACCACTACCCCAGCACCGAGGCCACCCACCCCGGCTCCTACCATCGCCTCCCAGCCTCTGTCCCTGCGTCCGGAGGCATG |
| | | TAGACCCGCAGCTGGTGGGGCCGTGCATACCCGGGGTCTTGACTTCGCCTGCGATATCTACATTTGGGCCCCTCTGGCTG |
| | | GTACTTGCGGGGTCCTGCTGCTTTCACTCGTGATCACTCTTTACTGTAAGCGCGGTCGGAAGAAGCTGCTGTACATCTTT |
| | | AAGCAACCCTTCATGAGGCCTGTGCAGACTACTCAAGAGGAGGACGGCTGTTCATGCCGGTTCCCAGAGGAGGAGGAAGG |
| | | CGGCTGCGAACTGCGCGTGAAATTCAGCCGCAGCGCAGATGCTCCAGCCTACAAGCAGGGGCAGAACCAGCTCTACAACG |
| | | AACTCAATCTTGGTCGGAGAGAGGAGTACGACGTGCTGGACAAGCGGAGAGGACGGGACCCAGAAATGGGCGGGAAGCCG |
| | | CGCAGAAAGAATCCCCAAGAGGGCCTGTACAACGAGCTCCAAAAGGATAAGATGGCAGAAGCCTATAGCGAGATTGGTAT |
| | | GAAAGGGGAACGCAGAAGAGGCAAAGGCCACGACGGACTGTACCAGGGACTCAGCACCGCCACCAAGGACACCTATGACG |
| | | CTCTTCACATGCAGGCCCTGCCGCCTCGG |
| 497 | M13 | CAAGTTCAACTCGTGCAATCAGGTGGAGGACTCGTCAAACCCGGAGGATCATTGAGACTGTCATGCGAAGCGAGCGGTTT |
| | (ScFv | TATCTTCTCCGATTACTAT |
| | domain) | ATGGGATGGATTCGGCAGGCCCCGGGAAAGGGACTCGAATGGGTGTCATACATCGGAAGGTCAGGCTCGTCCATGTACTA |
| | >TE13- | CGCAGACTCGGTGAAAGGCAGATTCACCTTTAGCCGGGACAACGCCAAGAATTCCCTCTACTTGCAGATGAACAGCCTGC |
| | 19LD | GAGCCGAGGATACTGCTGTCTACTACTGTGCCGCGTCGCCGGTGGTGGCAGCTACTGAAGATTTCCAGCACTGGGGACAG |
| | (M13) | GGAACTCTGGTCACGGTGTCGAGCGGTGGGGGCGGAAGCGGAGGCGGAGGATCGGGCGGCGGAGGTTCGGGGGGGGGAGG |
| | | GTCTGACATCGTGATGACCCAAACCCCAGCCACCCTGAGCCTCTCCCCTGGAGAGCGCGCGACTCTTTCGTGCCGCGCTT |
| | | CCCAGTCAGTGACCAGCAATTACTTGGCTTGGTACCAACAGAAGCCGGGACAGGCGCCACGGCTGCTGCTTTTTGGTGCC |
| | | AGCACTCGCGCCACCGGAATCCCGGATCGCTTCTCGGGCTCAGGGTCCGGGACGGACTTCACCCTGACTATCAACCGGCT |
| | | GGAACCTGAGGACTTCGCGATGTACTACTGCCAGCAGTACGGCTCCGCACCAGTCACTTTCGGACAAGGCACCAAGCTGG |
| | | AGATCAAG |
| 498 | M13 | ATGGCCCTCCCTGTCACCGCCCTGCTGCTTCCGCTGGCTCTTCTGCTCCACGCCGCTCGGCCCCAAGTTCAACTCGTGCA |
| | (Full) | ATCAGGTGGAGGACTCGTCAAACCCGGAGGATCATTGAGACTGTCATGCGAAGCGAGCGGTTTTATCTTCTCCGATTACT |
| | >TE13- | AT |
| | 19LD | ATGGGATGGATTCGGCAGGCCCCGGGAAAGGGACTCGAATGGGTGTCATACATCGGAAGGTCAGGCTCGTCCATGTACTA |
| | (M13) | CGCAGACTCGGTGAAAGGCAGATTCACCTTTAGCCGGGACAACGCCAAGAATTCCCTCTACTTGCAGATGAACAGCCTGC |
| | | GAGCCGAGGATACTGCTGTCTACTACTGTGCCGCGTCGCCGGTGGTGGCAGCTACTGAAGATTTCCAGCACTGGGGACAG |
| | | GGAACTCTGGTCACGGTGTCGAGCGGTGGGGGCGGAAGCGGAGGCGGAGGATCGGGCGGCGGAGGTTCGGGGGGGGGAGG |
| | | GTCTGACATCGTGATGACCCAAACCCCAGCCACCCTGAGCCTCTCCCCTGGAGAGCGCGCGACTCTTTCGTGCCGCGCTT |
| | | CCCAGTCAGTGACCAGCAATTACTTGGCTTGGTACCAACAGAAGCCGGGACAGGCGCCACGGCTGCTGCTTTTTGGTGCC |
| | | AGCACTCGCGCCACCGGAATCCCGGATCGCTTCTCGGGCTCAGGGTCCGGGACGGACTTCACCCTGACTATCAACCGGCT |
| | | GGAACCTGAGGACTTCGCGATGTACTACTGCCAGCAGTACGGCTCCGCACCAGTCACTTTCGGACAAGGCACCAAGCTGG |
| | | AGATCAAGACCACTACCCCAGCACCGAGGCCACCCACCCCGGCTCCTACCATCGCCTCCCAGCCTCTGTCCCTGCGTCCG |
| | | GAGGCATGTAGACCCGCAGCTGGTGGGGCCGTGCATACCCGGGGTCTTGACTTCGCCTGCGATATCTACATTTGGGCCCC |
| | | TCTGGCTGGTACTTGCGGGGTCCTGCTGCTTTCACTCGTGATCACTCTTTACTGTAAGCGCGGTCGGAAGAAGCTGCTGT |
| | | ACATCTTTAAGCAACCCTTCATGAGGCCTGTGCAGACTACTCAAGAGGAGGACGGCTGTTCATGCCGGTTCCCAGAGGAG |
| | | GAGGAAGGCGGCTGCGAACTGCGCGTGAAATTCAGCCGCAGCGCAGATGCTCCAGCCTACAAGCAGGGGCAGAACCAGCT |
| | | CTACAACGAACTCAATCTTGGTCGGAGAGAGGAGTACGACGTGCTGGACAAGCGGAGAGGACGGGACCCAGAAATGGGCG |
| | | GGAAGCCGCGCAGAAAGAATCCCCAAGAGGGCCTGTACAACGAGCTCCAAAAGGATAAGATGGCAGAAGCCTATAGCGAG |
| | | ATTGGTATGAAAGGGGAACGCAGAAGAGGCAAAGGCCACGACGGACTGTACCAGGGACTCAGCACCGCCACCAAGGACAC |
| | | CTATGACGCTCTTCACATGCAGGCCCTGCCGCCTCGG |
| 499 | M14 | CAAGTCCAACTCGTCCAGTCGGGAGCAGAAGTTAGAGCACCAGGAGCGTCAGTGAAAATCTCATGCAAGGCCTCGGGCTT |
| | (ScFv | CACGTTCCGCGGATACTAC |
| | domain) | ATCCACTGGGTGCGCCAAGCCCCGGGTCAGGGATTGGAGTGGATGGGAATCATTAACCCATCAGGAGGGAGCCGGGCTTA |
| | >BS83- | CGCGCAGAAGTTCCAGGGACGCGTCACTATGACCCGAGATACTTCCACCTCGACTGTGTACATGGAACTCTCGTCCCTGA |
| | 95ID | GGTCCGACGACACTGCGATGTATTACTGTGCTCGGACTGCCAGCTGCGGTGGGGACTGTTACTACCTCGATTACTGGGGC |
| | (M14) | CAGGGAACTCTGGTGACCGTGTCCAGCGGAGGTGGCGGGTCAGGGGGTGGCGGAAGCGGAGGCGGCGGTTCAGGCGGAGG |
| | | AGGCTCGGACATCCAAATGACGCAATCGCCGCCTACCCTGAGCGCTTCCGTGGGAGATCGGGTGACCATTACTTGCAGAG |
| | | CATCCGAGAACGTCAATATCTGGCTGGCCTGGTACCAACAGAAGCCGGGGAAGGCCCCTAAACTGCTGATCTACAAGTCG |
| | | AGCAGCCTTGCCTCTGGAGTGCCCTCCCGCTTCTCGGGCTCGGGATCAGGAGCGGAATTCACCCTCACCATCTCCTCCCT |
| | | GCAGCCAGATGACTTTGCCACCTACTACTGCCAGCAGTACCAGAGCTATCCGTTGACCTTTGGGGGAGGCACTAAAGTGG |
| | | ACATCAAG |
| 500 | M14 | ATGGCCCTCCCTGTCACCGCCCTGCTGCTTCCGCTGGCTCTTCTGCTCCACGCCGCTCGGCCCCAAGTCCAACTCGTCCA |
| | (Full) | GTCGGGAGCAGAAGTTAGAGCACCAGGAGCGTCAGTGAAAATCTCATGCAAGGCCTCGGGCTTCACGTTCCGCGGATACT |
| | >BS83- | AC |
| | 95ID | ATCCACTGGGTGCGCCAAGCCCCGGGTCAGGGATTGGAGTGGATGGGAATCATTAACCCATCAGGAGGGAGCCGGGCTTA |
| | (M14) | CGCGCAGAAGTTCCAGGGACGCGTCACTATGACCCGAGATACTTCCACCTCGACTGTGTACATGGAACTCTCGTCCCTGA |
| | | GGTCCGACGACACTGCGATGTATTACTGTGCTCGGACTGCCAGCTGCGGTGGGGACTGTTACTACCTCGATTACTGGGGC |
| | | CAGGGAACTCTGGTGACCGTGTCCAGCGGAGGTGGCGGGTCAGGGGGTGGCGGAAGCGGAGGCGGCGGTTCAGGCGGAGG |
| | | AGGCTCGGACATCCAAATGACGCAATCGCCGCCTACCCTGAGCGCTTCCGTGGGAGATCGGGTGACCATTACTTGCAGAG |
| | | CATCCGAGAACGTCAATATCTGGCTGGCCTGGTACCAACAGAAGCCGGGGAAGGCCCCTAAACTGCTGATCTACAAGTCG |
| | | AGCAGCCTTGCCTCTGGAGTGCCCTCCCGCTTCTCGGGCTCGGGATCAGGAGCGGAATTCACCCTCACCATCTCCTCCCT |
| | | GCAGCCAGATGACTTTGCCACCTACTACTGCCAGCAGTACCAGAGCTATCCGTTGACCTTTGGGGGAGGCACTAAAGTGG |
| | | ACATCAAGACCACTACCCCAGCACCGAGGCCACCCACCCCGGCTCCTACCATCGCCTCCCAGCCTCTGTCCCTGCGTCCG |
| | | GAGGCATGTAGACCCGCAGCTGGTGGGGCCGTGCATACCCGGGGTCTTGACTTCGCCTGCGATATCTACATTTGGGCCCC |
| | | TCTGGCTGGTACTTGCGGGGTCCTGCTGCTTTCACTCGTGATCACTCTTTACTGTAAGCGCGGTCGGAAGAAGCTGCTGT |
| | | ACATCTTTAAGCAACCCTTCATGAGGCCTGTGCAGACTACTCAAGAGGAGGACGGCTGTTCATGCCGGTTCCCAGAGGAG |
| | | GAGGAAGGCGGCTGCGAACTGCGCGTGAAATTCAGCCGCAGCGCAGATGCTCCAGCCTACAAGCAGGGGCAGAACCAGCT |
| | | CTACAACGAACTCAATCTTGGTCGGAGAGAGGAGTACGACGTGCTGGACAAGCGGAGAGGACGGGACCCAGAAATGGGCG |
| | | GGAAGCCGCGCAGAAAGAATCCCCAAGAGGGCCTGTACAACGAGCTCCAAAAGGATAAGATGGCAGAAGCCTATAGCGAG |
| | | ATTGGTATGAAAGGGGAACGCAGAAGAGGCAAAGGCCACGACGGACTGTACCAGGGACTCAGCACCGCCACCAAGGACAC |
| | | CTATGACGCTCTTCACATGCAGGCCCTGCCGCCTCGG |
| 501 | M15 | CAAGTTCAACTCGTTCAA |
| | (ScFv | TCAGGTGGAGGACTCGTGCAACCAGGAAGATCACTCAGACTCAGCTGCGCCGCGTCGGGATTCACTTTCGATGACTACGC |
| | domain) | AATGCACTGGGTGCGGCAGGCCCCGGGCAAAGGACTGGAATGGGTGAGCGGAATTAGCTGGAACTCGGGGTCCATCGGGT |
| | >HS86- | ACGCCGACTCGGTGAAGGGACGCTTTACGATCTCCCGGGACAATGCCAAGAACTCCCTGTATTTGCAGATGAACTCCTTG |
| | 94XD | AGGGCTGAGGACACCGCCGTGTACTACTGCGCTAAAGATGGATCATCGTCCTGGTCCTGGGGATACTTCGATTACTGGGG |
| | (M15) | CCAGGGCACTCTGGTGACCGTGTCGTCAGGCGGTGGAGGGTCGGGCGGAGGAGGTAGCGGAGGCGGAGGGAGCAGCTCTG |
| | | AACTGACCCAAGACCCGGCGGTGTCGGTCGCCCTTGGTCAGACTGTGCGGACTACCTGTCAGGGGGACGCGCTGCGCTCG |
| | | TACTACGCTTCATGGTACCAGCAGAAGCCCGGACAGGCACCTATGCTGGTCATCTACGGAAAGAATAACCGCCCATCCGG |
| | | CATCCCGGATCGCTTCTCGGGTTCGGACAGCGGCGACACCGCATCCCTGACGATCACTGGAGCGCAGGCCGAGGATGAAG |
| | | CCGACTACTACTGCAATTCCCGAGATTCAAGCGGCTACCCTGTGTTTGGGACCGGAACTAAGGTCACCGTCCTG |
| 502 | M15 | ATGGCCCTCCCTGTCACCGCCCTGCTGCTTCCGCTGGCTCTTCTGCTCCACGCCGCTCGGCCCCAAGTTCAACTCGTTCA |
| | (Full) | A |
| | >HS86- | TCAGGTGGAGGACTCGTGCAACCAGGAAGATCACTCAGACTCAGCTGCGCCGCGTCGGGATTCACTTTCGATGACTACGC |
| | 94XD | AATGCACTGGGTGCGGCAGGCCCCGGGCAAAGGACTGGAATGGGTGAGCGGAATTAGCTGGAACTCGGGGTCCATCGGGT |
| | (M15) | ACGCCGACTCGGTGAAGGGACGCTTTACGATCTCCCGGGACAATGCCAAGAACTCCCTGTATTTGCAGATGAACTCCTTG |
| | | AGGGCTGAGGACACCGCCGTGTACTACTGCGCTAAAGATGGATCATCGTCCTGGTCCTGGGGATACTTCGATTACTGGGG |
| | | CCAGGGCACTCTGGTGACCGTGTCGTCAGGCGGTGGAGGGTCGGGCGGAGGAGGTAGCGGAGGCGGAGGGAGCAGCTCTG |
| | | AACTGACCCAAGACCCGGCGGTGTCGGTCGCCCTTGGTCAGACTGTGCGGACTACCTGTCAGGGGGACGCGCTGCGCTCG |
| | | TACTACGCTTCATGGTACCAGCAGAAGCCCGGACAGGCACCTATGCTGGTCATCTACGGAAAGAATAACCGCCCATCCGG |
| | | CATCCCGGATCGCTTCTCGGGTTCGGACAGCGGCGACACCGCATCCCTGACGATCACTGGAGCGCAGGCCGAGGATGAAG |
| | | CCGACTACTACTGCAATTCCCGAGATTCAAGCGGCTACCCTGTGTTTGGGACCGGAACTAAGGTCACCGTCCTGACCACT |
| | | ACCCCAGCACCGAGGCCACCCACCCCGGCTCCTACCATCGCCTCCCAGCCTCTGTCCCTGCGTCCGGAGGCATGTAGACC |
| | | CGCAGCTGGTGGGGCCGTGCATACCCGGGGTCTTGACTTCGCCTGCGATATCTACATTTGGGCCCCTCTGGCTGGTACTT |
| | | GCGGGGTCCTGCTGCTTTCACTCGTGATCACTCTTTACTGTAAGCGCGGTCGGAAGAAGCTGCTGTACATCTTTAAGCAA |
| | | CCCTTCATGAGGCCTGTGCAGACTACTCAAGAGGAGGACGGCTGTTCATGCCGGTTCCCAGAGGAGGAGGAAGGCGGCTG |
| | | CGAACTGCGCGTGAAATTCAGCCGCAGCGCAGATGCTCCAGCCTACAAGCAGGGGCAGAACCAGCTCTACAACGAACTCA |
| | | ATCTTGGTCGGAGAGAGGAGTACGACGTGCTGGACAAGCGGAGAGGACGGGACCCAGAAATGGGCGGGAAGCCGCGCAGA |
| | | AAGAATCCCCAAGAGGGCCTGTACAACGAGCTCCAAAAGGATAAGATGGCAGAAGCCTATAGCGAGATTGGTATGAAAGG |
| | | GGAACGCAGAAGAGGCAAAGGCCACGACGGACTGTACCAGGGACTCAGCACCGCCACCAAGGACACCTATGACGCTCTTC |
| | | ACATGCAGGCCCTGCCGCCTCGG |
| 503 | M16 | GAAGTGCAACTCGTGGAA |
| | (ScFv | TCTGGTGGAGGACTTGTGCAACCTGGAAGATCGTTGAGACTCTCATGTGCTGCCTCCGGGTTCACCTTTGACGACTACGC |
| | domain) | CATGCACTGGGTGCGCCAGGCACCAGGAAAGGGTCTGGAGTGGGTTTCGGGTATCTCGTGGAACTCCGGGAGCACTGGCT |
| | >XS87- | ACGCTGATTCGGTGAAAGGCCGGTTTACCATCTCCCGAGACAATGCGAAGAATTCCCTCTATCTGCAGATGAACAGCCTC |
| | 99RD | CGGGCCGAGGATACTGCCCTGTACTACTGCGCCAAGGATAGCTCATCATGGTACGGAGGTGGATCGGCTTTCGATATCTG |
| | (M16) | GGGCCAGGGCACGATGGTCACCGTGTCCTCGGGGGGCGGAGGCTCCGGGGGAGGAGGTAGCGGAGGAGGAGGATCGAGCT |
| | | CAGAGTTGACTCAAGAACCCGCAGTGTCCGTGGCACTGGGCCAAACCGTCAGGATCACTTGCCAGGGAGACAGCCTGAGG |
| | | TCGTACTACGCGTCCTGGTACCAGCAGAAGCCGGGACAGGCCCCGGTCCTGGTCATTTTCGGACGCTCAAGACGCCCATC |
| | | GGGCATCCCGGACCGGTTCAGCGGAAGCTCCTCGGGAAACACCGCGTCACTTATCATTACCGGCGCACAGGCTGAGGACG |
| | | AAGCGGATTACTACTGCAACTCCCGCGACAATACTGCCAACCATTACGTGTTCGGGACCGGAACGAAACTGACTGTCCTG |
| 504 | M16 | ATGGCCCTCCCTGTCACCGCCCTGCTGCTTCCGCTGGCTCTTCTGCTCCACGCCGCTCGGCCCGAAGTGCAACTCGTGGA |
| | (Full) | A |
| | >XS87- | TCTGGTGGAGGACTTGTGCAACCTGGAAGATCGTTGAGACTCTCATGTGCTGCCTCCGGGTTCACCTTTGACGACTACGC |
| | 99RD | CATGCACTGGGTGCGCCAGGCACCAGGAAAGGGTCTGGAGTGGGTTTCGGGTATCTCGTGGAACTCCGGGAGCACTGGCT |
| | (M16) | ACGCTGATTCGGTGAAAGGCCGGTTTACCATCTCCCGAGACAATGCGAAGAATTCCCTCTATCTGCAGATGAACAGCCTC |
| | | CGGGCCGAGGATACTGCCCTGTACTACTGCGCCAAGGATAGCTCATCATGGTACGGAGGTGGATCGGCTTTCGATATCTG |
| | | GGGCCAGGGCACGATGGTCACCGTGTCCTCGGGGGGCGGAGGCTCCGGGGGAGGAGGTAGCGGAGGAGGAGGATCGAGCT |
| | | CAGAGTTGACTCAAGAACCCGCAGTGTCCGTGGCACTGGGCCAAACCGTCAGGATCACTTGCCAGGGAGACAGCCTGAGG |
| | | TCGTACTACGCGTCCTGGTACCAGCAGAAGCCGGGACAGGCCCCGGTCCTGGTCATTTTCGGACGCTCAAGACGCCCATC |
| | | GGGCATCCCGGACCGGTTCAGCGGAAGCTCCTCGGGAAACACCGCGTCACTTATCATTACCGGCGCACAGGCTGAGGACG |
| | | AAGCGGATTACTACTGCAACTCCCGCGACAATACTGCCAACCATTACGTGTTCGGGACCGGAACGAAACTGACTGTCCTG |
| | | ACCACTACCCCAGCACCGAGGCCACCCACCCCGGCTCCTACCATCGCCTCCCAGCCTCTGTCCCTGCGTCCGGAGGCATG |
| | | TAGACCCGCAGCTGGTGGGGCCGTGCATACCCGGGGTCTTGACTTCGCCTGCGATATCTACATTTGGGCCCCTCTGGCTG |
| | | GTACTTGCGGGGTCCTGCTGCTTTCACTCGTGATCACTCTTTACTGTAAGCGCGGTCGGAAGAAGCTGCTGTACATCTTT |
| | | AAGCAACCCTTCATGAGGCCTGTGCAGACTACTCAAGAGGAGGACGGCTGTTCATGCCGGTTCCCAGAGGAGGAGGAAGG |
| | | CGGCTGCGAACTGCGCGTGAAATTCAGCCGCAGCGCAGATGCTCCAGCCTACAAGCAGGGGCAGAACCAGCTCTACAACG |
| | | AACTCAATCTTGGTCGGAGAGAGGAGTACGACGTGCTGGACAAGCGGAGAGGACGGGACCCAGAAATGGGCGGGAAGCCG |
| | | CGCAGAAAGAATCCCCAAGAGGGCCTGTACAACGAGCTCCAAAAGGATAAGATGGCAGAAGCCTATAGCGAGATTGGTAT |
| | | GAAAGGGGAACGCAGAAGAGGCAAAGGCCACGACGGACTGTACCAGGGACTCAGCACCGCCACCAAGGACACCTATGACG |
| | | CTCTTCACATGCAGGCCCTGCCGCCTCGG |
| 505 | M17 | GAAGTTCAATTGGTGGAA |
| | (ScFv | TCTGGAGGAGGACTTGTGCAACCCGGTAGATCTCTGAGACTGTCCTGTGCGGCATCGGGATTCACCTTCGACGACTACGC |
| | domain) | TATGCACTGGGTGAGACAAGCCCCTGGAAAAGGACTGGAGTGGGTGTCAGGCATCTCCTGGAATAGCGGGTCCACTGGAT |
| | >NS89- | ACGCCGATTCGGTCAAGGGTCGCTTCACCATTTCCCGGGACAATGCCAAGAACTCCCTGTACCTTCAAATGAACTCCCTC |
| | 94MD | CGGGCCGAGGATACCGCCCTCTACTACTGCGCCAAAGACAGCTCGTCATGGTATGGCGGAGGGTCGGCATTTGACATCTG |
| | (M17) | GGGACAGGGAACTATGGTGACTGTGTCATCAGGAGGCGGCGGAAGCGGCGGCGGCGGGTCCGGCGGAGGAGGGTCGTCCA |
| | | GCGAACTCACCCAAGATCCAGCAGTGAGCGTCGCGCTGGGCCAGACCGTCAGGATCACGTGCCAGGGAGATTCACTGCGC |
| | | TCATACTACGCGTCCTGGTACCAGCAGAAGCCGGGGCAGGCCCCGGTCCTCGTGATCTACGGAAAGAACAACCGCCCGTC |
| | | GGGTATCCCAGACCGCTTTTCGGGTAGCTCCAGCGGAAATACGGCTAGCCTGACCATCACTGGAGCACAGGCTGAGGATG |
| | | AAGCGGACTACTACTGCAATTCGCGGGGCTCATCGGGGAACCATTACGTGTTCGGAACTGGTACCAAGGTGACTGTCCTG |
| 506 | M17 | ATGGCCCTCCCTGTCACCGCCCTGCTGCTTCCGCTGGCTCTTCTGCTCCACGCCGCTCGGCCCGAAGTTCAATTGGTGGA |
| | (Full) | A |
| | >NS89- | TCTGGAGGAGGACTTGTGCAACCCGGTAGATCTCTGAGACTGTCCTGTGCGGCATCGGGATTCACCTTCGACGACTACGC |
| | 94MD | TATGCACTGGGTGAGACAAGCCCCTGGAAAAGGACTGGAGTGGGTGTCAGGCATCTCCTGGAATAGCGGGTCCACTGGAT |
| | (M17) | ACGCCGATTCGGTCAAGGGTCGCTTCACCATTTCCCGGGACAATGCCAAGAACTCCCTGTACCTTCAAATGAACTCCCTC |
| | | CGGGCCGAGGATACCGCCCTCTACTACTGCGCCAAAGACAGCTCGTCATGGTATGGCGGAGGGTCGGCATTTGACATCTG |
| | | GGGACAGGGAACTATGGTGACTGTGTCATCAGGAGGCGGCGGAAGCGGCGGCGGCGGGTCCGGCGGAGGAGGGTCGTCCA |
| | | GCGAACTCACCCAAGATCCAGCAGTGAGCGTCGCGCTGGGCCAGACCGTCAGGATCACGTGCCAGGGAGATTCACTGCGC |
| | | TCATACTACGCGTCCTGGTACCAGCAGAAGCCGGGGCAGGCCCCGGTCCTCGTGATCTACGGAAAGAACAACCGCCCGTC |
| | | GGGTATCCCAGACCGCTTTTCGGGTAGCTCCAGCGGAAATACGGCTAGCCTGACCATCACTGGAGCACAGGCTGAGGATG |
| | | AAGCGGACTACTACTGCAATTCGCGGGGCTCATCGGGGAACCATTACGTGTTCGGAACTGGTACCAAGGTGACTGTCCTG |
| | | ACCACTACCCCAGCACCGAGGCCACCCACCCCGGCTCCTACCATCGCCTCCCAGCCTCTGTCCCTGCGTCCGGAGGCATG |
| | | TAGACCCGCAGCTGGTGGGGCCGTGCATACCCGGGGTCTTGACTTCGCCTGCGATATCTACATTTGGGCCCCTCTGGCTG |
| | | GTACTTGCGGGGTCCTGCTGCTTTCACTCGTGATCACTCTTTACTGTAAGCGCGGTCGGAAGAAGCTGCTGTACATCTTT |
| | | AAGCAACCCTTCATGAGGCCTGTGCAGACTACTCAAGAGGAGGACGGCTGTTCATGCCGGTTCCCAGAGGAGGAGGAAGG |
| | | CGGCTGCGAACTGCGCGTGAAATTCAGCCGCAGCGCAGATGCTCCAGCCTACAAGCAGGGGCAGAACCAGCTCTACAACG |
| | | AACTCAATCTTGGTCGGAGAGAGGAGTACGACGTGCTGGACAAGCGGAGAGGACGGGACCCAGAAATGGGCGGGAAGCCG |
| | | CGCAGAAAGAATCCCCAAGAGGGCCTGTACAACGAGCTCCAAAAGGATAAGATGGCAGAAGCCTATAGCGAGATTGGTAT |
| | | GAAAGGGGAACGCAGAAGAGGCAAAGGCCACGACGGACTGTACCAGGGACTCAGCACCGCCACCAAGGACACCTATGACG |
| | | CTCTTCACATGCAGGCCCTGCCGCCTCGG |
| 507 | M18 | CAAGTGCAGCTCGTTCAATCAGGCGGAGGACTCGTTCAACCAGGAGGATCATTGCGACTCTCATGTGCGGCCTCTGGATT |
| | (ScFv | CACGTTTAGCTCATATTGG |
| | domain) | ATGCACTGGGTGCGGCAGGCGCCGGGGAAAGGTCTGGTGTGGGTCAGCCGCATCAACTCAGACGGCTCCTCGACTTCGTA |
| | >DS90- | CGCCGACTCCGTGAAGGGACGCTTTACCATTTCCCGCGACAACGCCAAGAATACCCTTTACCTTCAGATGAACTCCCTCC |
| | 09HD | GCGCTGAGGATACCGCCGTGTACTACTGCGTGAGGACTGGCTGGGTCGGCAGCTACTACTACTACATGGACGTGTGGGGC |
| | (M18) | AAAGGAACTACTGTCACCGTGTCAAGCGGCGGTGGAGGTTCCGGCGGGGGAGGATCGGGGGGGGGCGGATCGGGTGGCGG |
| | | AGGATCGGAGATCGTGTTGACCCAGTCGCCGGGAACCCTGTCGCTGTCGCCTGGGGAGAGAGCAACTCTGTCCTGCCGGG |
| | | CTTCCCAGTCGGTGTCGAGCAATTACCTGGCATGGTACCAACAGAAGCCGGGACAGCCGCCACGCCTGCTGATCTATGAC |
| | | GTGTCAACTCGGGCAACTGGAATCCCTGCGCGGTTCAGCGGCGGAGGGAGCGGTACCGATTTCACCCTGACTATTTCCTC |
| | | CCTCGAACCAGAAGATTTCGCCGTCTACTACTGCCAGCAGAGAAGCAACTGGCCGCCCTGGACGTTCGGACAAGGAACCA |
| | | AGGTCGAAATCAAG |
| 508 | M18 | ATGGCCCTCCCTGTCACCGCCCTGCTGCTTCCGCTGGCTCTTCTGCTCCACGCCGCTCGGCCCCAAGTGCAGCTCGTTCA |
| | (Full) | ATCAGGCGGAGGACTCGTTCAACCAGGAGGATCATTGCGACTCTCATGTGCGGCCTCTGGATTCACGTTTAGCTCATATT |
| | >DS90- | GG |
| | 09HD | ATGCACTGGGTGCGGCAGGCGCCGGGGAAAGGTCTGGTGTGGGTCAGCCGCATCAACTCAGACGGCTCCTCGACTTCGTA |
| | (M18) | CGCCGACTCCGTGAAGGGACGCTTTACCATTTCCCGCGACAACGCCAAGAATACCCTTTACCTTCAGATGAACTCCCTCC |
| | | GCGCTGAGGATACCGCCGTGTACTACTGCGTGAGGACTGGCTGGGTCGGCAGCTACTACTACTACATGGACGTGTGGGGC |
| | | AAAGGAACTACTGTCACCGTGTCAAGCGGCGGTGGAGGTTCCGGCGGGGGAGGATCGGGGGGGGGCGGATCGGGTGGCGG |
| | | AGGATCGGAGATCGTGTTGACCCAGTCGCCGGGAACCCTGTCGCTGTCGCCTGGGGAGAGAGCAACTCTGTCCTGCCGGG |
| | | CTTCCCAGTCGGTGTCGAGCAATTACCTGGCATGGTACCAACAGAAGCCGGGACAGCCGCCACGCCTGCTGATCTATGAC |
| | | GTGTCAACTCGGGCAACTGGAATCCCTGCGCGGTTCAGCGGCGGAGGGAGCGGTACCGATTTCACCCTGACTATTTCCTC |
| | | CCTCGAACCAGAAGATTTCGCCGTCTACTACTGCCAGCAGAGAAGCAACTGGCCGCCCTGGACGTTCGGACAAGGAACCA |
| | | AGGTCGAAATCAAGACCACTACCCCAGCACCGAGGCCACCCACCCCGGCTCCTACCATCGCCTCCCAGCCTCTGTCCCTG |
| | | CGTCCGGAGGCATGTAGACCCGCAGCTGGTGGGGCCGTGCATACCCGGGGTCTTGACTTCGCCTGCGATATCTACATTTG |
| | | GGCCCCTCTGGCTGGTACTTGCGGGGTCCTGCTGCTTTCACTCGTGATCACTCTTTACTGTAAGCGCGGTCGGAAGAAGC |
| | | TGCTGTACATCTTTAAGCAACCCTTCATGAGGCCTGTGCAGACTACTCAAGAGGAGGACGGCTGTTCATGCCGGTTCCCA |
| | | GAGGAGGAGGAAGGCGGCTGCGAACTGCGCGTGAAATTCAGCCGCAGCGCAGATGCTCCAGCCTACAAGCAGGGGCAGAA |
| | | CCAGCTCTACAACGAACTCAATCTTGGTCGGAGAGAGGAGTACGACGTGCTGGACAAGCGGAGAGGACGGGACCCAGAAA |
| | | TGGGCGGGAAGCCGCGCAGAAAGAATCCCCAAGAGGGCCTGTACAACGAGCTCCAAAAGGATAAGATGGCAGAAGCCTAT |
| | | AGCGAGATTGGTATGAAAGGGGAACGCAGAAGAGGCAAAGGCCACGACGGACTGTACCAGGGACTCAGCACCGCCACCAA |
| | | GGACACCTATGACGCTCTTCACATGCAGGCCCTGCCGCCTCGG |
| 509 | M19 | CAAGTGCAATTGGTTCAA |
| | (ScFv | TCAGGAGGAGGAGTCGTGCAGCCCGGAAGATCGTTGAGACTGTCATGTGCCGCGAGCGGCTTTACTTTCTCAAGCTACGG |
| | domain) | AATGCATTGGGTGCGACAGGCTCCGGGAAAAGGACTGGAATGGGTCGCAGTGATCTCATACGACGGCTCGAACAAGTACT |
| | >TS92- | ACGCCGACTCCGTCAAGGGTCGGTTCACGATTTCGCGCGATAATTCCAAGAACACTCTGTACCTCCAAATGAACAGCCTC |
| | 04BD | CGGGCAGAGGACACCGCCGTCTACTACTGCGCTAAGGGATACTCGCGCTACTACTACTATGGAATGGATGTGTGGGGCCA |
| | (M19) | GGGAACTACCGTGACGGTGTCGTCCGGCGGCGGTGGGTCGGGCGGAGGCGGATCAGGTGGAGGTGGAAGCGGAGGAGGAG |
| | | GGAGCGAAATCGTCATGACTCAGTCCCCTGCTACCCTTTCTCTGTCGCCGGGAGAAAGAGCCATCCTGAGCTGCCGGGCC |
| | | TCCCAGAGCGTGTACACCAAATACCTGGGATGGTACCAGCAGAAGCCGGGGCAGGCACCAAGGCTCCTGATCTACGATGC |
| | | GTCCACCCGCGCGACTGGTATCCCAGACCGCTTTTCCGGCTCGGGGTCAGGGACTGACTTCACCCTTACTATCAATCGGC |
| | | TCGAGCCTGAGGATTTCGCCGTGTATTACTGCCAGCACTACGGAGGGTCCCCGCTGATTACCTTCGGCCAAGGCACCAAA |
| | | GTGGACATCAAG |
| 510 | M19 | ATGGCCCTCCCTGTCACCGCCCTGCTGCTTCCGCTGGCTCTTCTGCTCCACGCCGCTCGGCCCCAAGTGCAATTGGTTCA |
| | (Full) | A |
| | >TS92- | TCAGGAGGAGGAGTCGTGCAGCCCGGAAGATCGTTGAGACTGTCATGTGCCGCGAGCGGCTTTACTTTCTCAAGCTACGG |
| | 04BD | AATGCATTGGGTGCGACAGGCTCCGGGAAAAGGACTGGAATGGGTCGCAGTGATCTCATACGACGGCTCGAACAAGTACT |
| | (M19) | ACGCCGACTCCGTCAAGGGTCGGTTCACGATTTCGCGCGATAATTCCAAGAACACTCTGTACCTCCAAATGAACAGCCTC |
| | | CGGGCAGAGGACACCGCCGTCTACTACTGCGCTAAGGGATACTCGCGCTACTACTACTATGGAATGGATGTGTGGGGCCA |
| | | GGGAACTACCGTGACGGTGTCGTCCGGCGGCGGTGGGTCGGGCGGAGGCGGATCAGGTGGAGGTGGAAGCGGAGGAGGAG |
| | | GGAGCGAAATCGTCATGACTCAGTCCCCTGCTACCCTTTCTCTGTCGCCGGGAGAAAGAGCCATCCTGAGCTGCCGGGCC |
| | | TCCCAGAGCGTGTACACCAAATACCTGGGATGGTACCAGCAGAAGCCGGGGCAGGCACCAAGGCTCCTGATCTACGATGC |
| | | GTCCACCCGCGCGACTGGTATCCCAGACCGCTTTTCCGGCTCGGGGTCAGGGACTGACTTCACCCTTACTATCAATCGGC |
| | | TCGAGCCTGAGGATTTCGCCGTGTATTACTGCCAGCACTACGGAGGGTCCCCGCTGATTACCTTCGGCCAAGGCACCAAA |
| | | GTGGACATCAAGACCACTACCCCAGCACCGAGGCCACCCACCCCGGCTCCTACCATCGCCTCCCAGCCTCTGTCCCTGCG |
| | | TCCGGAGGCATGTAGACCCGCAGCTGGTGGGGCCGTGCATACCCGGGGTCTTGACTTCGCCTGCGATATCTACATTTGGG |
| | | CCCCTCTGGCTGGTACTTGCGGGGTCCTGCTGCTTTCACTCGTGATCACTCTTTACTGTAAGCGCGGTCGGAAGAAGCTG |
| | | CTGTACATCTTTAAGCAACCCTTCATGAGGCCTGTGCAGACTACTCAAGAGGAGGACGGCTGTTCATGCCGGTTCCCAGA |
| | | GGAGGAGGAAGGCGGCTGCGAACTGCGCGTGAAATTCAGCCGCAGCGCAGATGCTCCAGCCTACAAGCAGGGGCAGAACC |
| | | AGCTCTACAACGAACTCAATCTTGGTCGGAGAGAGGAGTACGACGTGCTGGACAAGCGGAGAGGACGGGACCCAGAAATG |
| | | GGCGGGAAGCCGCGCAGAAAGAATCCCCAAGAGGGCCTGTACAACGAGCTCCAAAAGGATAAGATGGCAGAAGCCTATAG |
| | | CGAGATTGGTATGAAAGGGGAACGCAGAAGAGGCAAAGGCCACGACGGACTGTACCAGGGACTCAGCACCGCCACCAAGG |
| | | ACACCTATGACGCTCTTCACATGCAGGCCCTGCCGCCTCGG |
| 511 | M20 | CAAGTGCAACTTGTTCAATCAGGAGGAGGACTCGTTCAACCCGGAGGATCACTGCGACTCTCATGTGCAGCGTCGGGGTT |
| | (ScFv | CACCTTCTCCAGCTACGCA |
| | domain) | ATGTCCTGGGTGCGCCAAGCCCCTGGAAAAGGCCTGGAGTGGGTGTCGGCCATCTCTGGGAGCGGGGGATCAACTTACTA |
| | >JS93- | CGCTGACTCCGTCAAGGGCCGCTTTACCATCTCCCGGGACAACAGCAAGAACACTCTCTATCTCCAGATGAACTCGCTGA |
| | 08WD | GAGCCGAAGATACCGCTGTCTACTACTGCGCGAAGAGAGAAGCTGCCGCAGGGCACGATTGGTACTTCGACTTGTGGGGC |
| | (M20) | AGGGGCACCCTTGTGACCGTGTCCTCCGGTGGAGGCGGATCAGGAGGTGGGGGATCGGGTGGAGGAGGAAGCGGAGGCGG |
| | | CGGTTCGGACATTCGCGTCACCCAGTCACCGAGCTCCCTCAGCGCATCGGTGGGCGACCGGGTCACTATCACTTGCCGGG |
| | | CGTCCCAGTCGATCTCATCGTATCTGAATTGGTACCAGCAGAAACCGGGAAAGGCGCCGAAGCTGTTGATCTACGCTGCC |
| | | AGCTCCCTGCAGTCGGGTGTGCCATCACGCTTTTCCGGCTCGGGATCGGGAACCGATTTCACTCTGACGATCTCTAGCCT |
| | | GCAGCCAGAAGATTTCGCCACTTACTACTGCCAGCAGTCCTACAGCATCCCTCTGACTTTCGGACAAGGGACGAAAGTGG |
| | | AGATTAAG |
| 512 | M20 | ATGGCCCTCCCTGTCACCGCCCTGCTGCTTCCGCTGGCTCTTCTGCTCCACGCCGCTCGGCCCCAAGTGCAACTTGTTCA |
| | (Full) | ATCAGGAGGAGGACTCGTTCAACCCGGAGGATCACTGCGACTCTCATGTGCAGCGTCGGGGTTCACCTTCTCCAGCTACGCA |
| | >JS93- | ATGTCCTGGGTGCGCCAAGCCCCTGGAAAAGGCCTGGAGTGGGTGTCGGCCATCTCTGGGAGCGGGGGATCAACTTACTA |
| | 08WD | CGCTGACTCCGTCAAGGGCCGCTTTACCATCTCCCGGGACAACAGCAAGAACACTCTCTATCTCCAGATGAACTCGCTGA |
| | (M20) | GAGCCGAAGATACCGCTGTCTACTACTGCGCGAAGAGAGAAGCTGCCGCAGGGCACGATTGGTACTTCGACTTGTGGGGC |
| | | AGGGGCACCCTTGTGACCGTGTCCTCCGGTGGAGGCGGATCAGGAGGTGGGGGATCGGGTGGAGGAGGAAGCGGAGGCGG |
| | | CGGTTCGGACATTCGCGTCACCCAGTCACCGAGCTCCCTCAGCGCATCGGTGGGCGACCGGGTCACTATCACTTGCCGGG |
| | | CGTCCCAGTCGATCTCATCGTATCTGAATTGGTACCAGCAGAAACCGGGAAAGGCGCCGAAGCTGTTGATCTACGCTGCC |
| | | AGCTCCCTGCAGTCGGGTGTGCCATCACGCTTTTCCGGCTCGGGATCGGGAACCGATTTCACTCTGACGATCTCTAGCCT |
| | | GCAGCCAGAAGATTTCGCCACTTACTACTGCCAGCAGTCCTACAGCATCCCTCTGACTTTCGGACAAGGGACGAAAGTGG |
| | | AGATTAAGACCACTACCCCAGCACCGAGGCCACCCACCCCGGCTCCTACCATCGCCTCCCAGCCTCTGTCCCTGCGTCCG |
| | | GAGGCATGTAGACCCGCAGCTGGTGGGGCCGTGCATACCCGGGGTCTTGACTTCGCCTGCGATATCTACATTTGGGCCCC |
| | | TCTGGCTGGTACTTGCGGGGTCCTGCTGCTTTCACTCGTGATCACTCTTTACTGTAAGCGCGGTCGGAAGAAGCTGCTGT |
| | | ACATCTTTAAGCAACCCTTCATGAGGCCTGTGCAGACTACTCAAGAGGAGGACGGCTGTTCATGCCGGTTCCCAGAGGAG |
| | | GAGGAAGGCGGCTGCGAACTGCGCGTGAAATTCAGCCGCAGCGCAGATGCTCCAGCCTACAAGCAGGGGCAGAACCAGCT |
| | | CTACAACGAACTCAATCTTGGTCGGAGAGAGGAGTACGACGTGCTGGACAAGCGGAGAGGACGGGACCCAGAAATGGGCG |
| | | GGAAGCCGCGCAGAAAGAATCCCCAAGAGGGCCTGTACAACGAGCTCCAAAAGGATAAGATGGCAGAAGCCTATAGCGAG |
| | | ATTGGTATGAAAGGGGAACGCAGAAGAGGCAAAGGCCACGACGGACTGTACCAGGGACTCAGCACCGCCACCAAGGACAC |
| | | CTATGACGCTCTTCACATGCAGGCCCTGCCGCCTCGG |
| 513 | M21 | CAAGTCCAACTCGTTCAGTCATGGGCAGAAGTCAAGAAACCCGGTGCAAGCGTCAAAGTGTCGTGTAAGGCCTCCGGCTA |
| | (ScFv | CACTTTCACTTCCTACTAC |
| | domain) | ATGCACTGGGTGCGCCAAGCCCCGGGACAGGGCCTTGAATGGATGGGCATCATCAACCCATCAGGAGGTTCCACGAGCTA |
| | >ZS95- | CGCGCAGAAGTTCCAGGGGAGAGTGACGATGACTAGAGATACCTCCACGAGCACCGTCTACATGGAGCTGTCGAATCTGC |
| | 03QD | GGTCAGAGGACACTGCTGTGTATTACTGCGCGCGCTCCCCGCGGGTGACCACTGGCTACTTTGACTACTGGGGACAAGGG |
| | (M21) | ACCCTGGTGACCGTCAGCTCGGGAGGCGGAGGATCGGGAGGTGGAGGGTCCGGTGGAGGCGGCTCTGGAGGAGGCGGGTC |
| | | GGACATTCAATTGACCCAGAGCCCATCCACCCTCTCAGCCTCGGTGGGGGATAGGGTGACTATCACTTGCCGGGCCTCCC |
| | | AGTCAATTTCCAGCTGGCTGGCTTGGTACCAGCAAAAGCCTGGAAAGGCACCGAAGCTCCTGATCTACAAGGCCTCATCT |
| | | CTGGAATCAGGAGTGCCTTCGCGCTTCAGCGGAAGCGGCTCGGGAACTGAGTTTACCCTGACCATCTCGAGCCTGCAGCC |
| | | AGATGACTTCGCGACCTATTACTGCCAGCAGTACTCGTCCTACCCGTTGACTTTCGGAGGAGGTACCCGCCTCGAAATCAAA |
| 514 | M21 | ATGGCCCTCCCTGTCACCGCCCTGCTGCTTCCGCTGGCTCTTCTGCTCCACGCCGCTCGGCCCCAAGTCCAACTCGTTCA |
| | (Full) | GTCATGGGCAGAAGTCAAGAAACCCGGTGCAAGCGTCAAAGTGTCGTGTAAGGCCTCCGGCTACACTTTCACTTCCTACTAC |
| | >ZS95- | ATGCACTGGGTGCGCCAAGCCCCGGGACAGGGCCTTGAATGGATGGGCATCATCAACCCATCAGGAGGTTCCACGAGCTA |
| | 03QD | CGCGCAGAAGTTCCAGGGGAGAGTGACGATGACTAGAGATACCTCCACGAGCACCGTCTACATGGAGCTGTCGAATCTGC |
| | (M21) | GGTCAGAGGACACTGCTGTGTATTACTGCGCGCGCTCCCCGCGGGTGACCACTGGCTACTTTGACTACTGGGGACAAGGG |
| | | ACCCTGGTGACCGTCAGCTCGGGAGGCGGAGGATCGGGAGGTGGAGGGTCCGGTGGAGGCGGCTCTGGAGGAGGCGGGTC |
| | | GGACATTCAATTGACCCAGAGCCCATCCACCCTCTCAGCCTCGGTGGGGGATAGGGTGACTATCACTTGCCGGGCCTCCC |
| | | AGTCAATTTCCAGCTGGCTGGCTTGGTACCAGCAAAAGCCTGGAAAGGCACCGAAGCTCCTGATCTACAAGGCCTCATCT |
| | | CTGGAATCAGGAGTGCCTTCGCGCTTCAGCGGAAGCGGCTCGGGAACTGAGTTTACCCTGACCATCTCGAGCCTGCAGCC |
| | | AGATGACTTCGCGACCTATTACTGCCAGCAGTACTCGTCCTACCCGTTGACTTTCGGAGGAGGTACCCGCCTCGAAATCA |
| | | AAACCACTACCCCAGCACCGAGGCCACCCACCCCGGCTCCTACCATCGCCTCCCAGCCTCTGTCCCTGCGTCCGGAGGCA |
| | | TGTAGACCCGCAGCTGGTGGGGCCGTGCATACCCGGGGTCTTGACTTCGCCTGCGATATCTACATTTGGGCCCCTCTGGC |
| | | TGGTACTTGCGGGGTCCTGCTGCTTTCACTCGTGATCACTCTTTACTGTAAGCGCGGTCGGAAGAAGCTGCTGTACATCT |
| | | TTAAGCAACCCTTCATGAGGCCTGTGCAGACTACTCAAGAGGAGGACGGCTGTTCATGCCGGTTCCCAGAGGAGGAGGAA |
| | | GGCGGCTGCGAACTGCGCGTGAAATTCAGCCGCAGCGCAGATGCTCCAGCCTACAAGCAGGGGCAGAACCAGCTCTACAA |
| | | CGAACTCAATCTTGGTCGGAGAGAGGAGTACGACGTGCTGGACAAGCGGAGAGGACGGGACCCAGAAATGGGCGGGAAGC |
| | | CGCGCAGAAAGAATCCCCAAGAGGGCCTGTACAACGAGCTCCAAAAGGATAAGATGGCAGAAGCCTATAGCGAGATTGGT |
| | | ATGAAAGGGGAACGCAGAAGAGGCAAAGGCCACGACGGACTGTACCAGGGACTCAGCACCGCCACCAAGGACACCTATGA |
| | | CGCTCTTCACATGCAGGCCCTGCCGCCTCGG |
| 515 | M22 | CAAGTCCAACTCGTCCAGTCCGGTGCAGAAGTCAGAAGGCCAGGAGCAAGCGTGAAGATCTCGTGTAGAGCGTCAGGAGA |
| | (ScFv | CACCAGCACTCGCCATTAC |
| | domain) | ATCCACTGGCTGCGCCAGGCTCCGGGCCAAGGGCCGGAGTGGATGGGTGTGATCAACCCGACTACGGGACCGGCTACCGG |
| | >PS96- | AAGCCCTGCGTACGCACAGATGCTGCAGGGACGGGTGACTATGACCCGCGATACTAGCACTAGGACCGTGTACATGGAAC |
| | 08LD | TCCGCTCGTTGCGGTTCGAAGATACCGCCGTCTACTACTGCGCCCGGTCCGTGGTGGGCCGAAGCGCCCCTTACTACTTC |
| | (M22) | GATTACTGGGGACAGGGCACTCTGGTGACCGTTAGCTCCGGTGGGGGAGGCTCGGGTGGAGGCGGATCGGGAGGAGGAGG |
| | | CAGCGGTGGAGGGGGATCGGACATTCAGATGACCCAGTCACCCTCCTCCCTCTCAGCCTCGGTCGGGGACCGGGTGACCA |
| | | TTACGTGCAGAGCCTCACAAGGGATCTCGGACTACTCCGCCTGGTACCAGCAGAAACCGGGAAAAGCGCCAAAGCTCCTG |
| | | ATCTACGCCGCGAGCACCCTGCAATCAGGAGTGCCATCGCGCTTTTCTGGATCGGGCTCAGGGACTGACTTCACGCTGAC |
| | | TATCTCCTACCTTCAGTCCGAGGATTTCGCTACCTACTACTGCCAACAGTATTACTCCTATCCCCTGACCTTTGGCGGAG |
| | | GCACTAAGGTGGACATCAAG |
| 516 | M22 | ATGGCCCTCCCTGTCACCGCCCTGCTGCTTCCGCTGGCTCTTCTGCTCCACGCCGCTCGGCCCCAAGTCCAACTCGTCCA |
| | (Full) | GTCCGGTGCAGAAGTCAGAAGGCCAGGAGCAAGCGTGAAGATCTCGTGTAGAGCGTCAGGAGACACCAGCACTCGCCATTAC |
| | >PS96- | ATCCACTGGCTGCGCCAGGCTCCGGGCCAAGGGCCGGAGTGGATGGGTGTGATCAACCCGACTACGGGACCGGCTACCGG |
| | 08LD | AAGCCCTGCGTACGCACAGATGCTGCAGGGACGGGTGACTATGACCCGCGATACTAGCACTAGGACCGTGTACATGGAAC |
| | (M22) | TCCGCTCGTTGCGGTTCGAAGATACCGCCGTCTACTACTGCGCCCGGTCCGTGGTGGGCCGAAGCGCCCCTTACTACTTC |
| | | GATTACTGGGGACAGGGCACTCTGGTGACCGTTAGCTCCGGTGGGGGAGGCTCGGGTGGAGGCGGATCGGGAGGAGGAGG |
| | | CAGCGGTGGAGGGGGATCGGACATTCAGATGACCCAGTCACCCTCCTCCCTCTCAGCCTCGGTCGGGGACCGGGTGACCA |
| | | TTACGTGCAGAGCCTCACAAGGGATCTCGGACTACTCCGCCTGGTACCAGCAGAAACCGGGAAAAGCGCCAAAGCTCCTG |
| | | ATCTACGCCGCGAGCACCCTGCAATCAGGAGTGCCATCGCGCTTTTCTGGATCGGGCTCAGGGACTGACTTCACGCTGAC |
| | | TATCTCCTACCTTCAGTCCGAGGATTTCGCTACCTACTACTGCCAACAGTATTACTCCTATCCCCTGACCTTTGGCGGAG |
| | | GCACTAAGGTGGACATCAAGACCACTACCCCAGCACCGAGGCCACCCACCCCGGCTCCTACCATCGCCTCCCAGCCTCTG |
| | | TCCCTGCGTCCGGAGGCATGTAGACCCGCAGCTGGTGGGGCCGTGCATACCCGGGGTCTTGACTTCGCCTGCGATATCTA |
| | | CATTTGGGCCCCTCTGGCTGGTACTTGCGGGGTCCTGCTGCTTTCACTCGTGATCACTCTTTACTGTAAGCGCGGTCGGA |
| | | AGAAGCTGCTGTACATCTTTAAGCAACCCTTCATGAGGCCTGTGCAGACTACTCAAGAGGAGGACGGCTGTTCATGCCGG |
| | | TTCCCAGAGGAGGAGGAAGGCGGCTGCGAACTGCGCGTGAAATTCAGCCGCAGCGCAGATGCTCCAGCCTACAAGCAGGG |
| | | GCAGAACCAGCTCTACAACGAACTCAATCTTGGTCGGAGAGAGGAGTACGACGTGCTGGACAAGCGGAGAGGACGGGACC |
| | | CAGAAATGGGCGGGAAGCCGCGCAGAAAGAATCCCCAAGAGGGCCTGTACAACGAGCTCCAAAAGGATAAGATGGCAGAA |
| | | GCCTATAGCGAGATTGGTATGAAAGGGGAACGCAGAAGAGGCAAAGGCCACGACGGACTGTACCAGGGACTCAGCACCGC |
| | | CACCAAGGACACCTATGACGCTCTTCACATGCAGGCCCTGCCGCCTCGG |
| 517 | M23 | CAAGTCCAACTCCAGCAATCGGGAGCAGAAGTCAAGAAACCAGGCGCATCGGTGAAAGTGTCGTGTAAGGCGTCAGGGTA |
| | (ScFv | CACCTTCACCAACTACTAT |
| | domain) | ATGCACTGGGTGCGCCAGGCTCCAGGCCAGGGGTTGGAGTGGATGGGGATCATCAATCCGTCAGGTGGCTACACCACTTA |
| | >XH66- | CGCTCAGAAGTTCCAGGGACGCCTCACTATGACTCGCGATACTAGCACCTCCACGGTGTACATGGAACTGTCATCGCTGA |
| | 84HE | GGTCCGAAGATACCGCCGTCTACTACTGCGCACGGATCAGATCCTGCGGAGGAGATTGTTACTACTTTGACAACTGGGGA |
| | (M23) | CAGGGCACCCTTGTTACTGTGTCATCGGGAGGAGGGGGAAGCGGAGGAGGTGGATCAGGCGGCGGTGGCAGCGGGGGCGG |
| | | AGGATCGGACATTCAGCTGACTCAGTCCCCCTCCACTTTGTCGGCCAGCGTGGGAGACAGAGTGACCATCACTTGCCGGG |
| | | CGTCCGAGAACGTCAATATCTGGCTGGCCTGGTACCAGCAAAAGCCTGGAAAAGCCCCGAAGCTGCTCATCTATAAGTCA |
| | | TCCAGCCTGGCGTCTGGTGTGCCGTCGCGGTTCTCCGGCAGCGGGAGCGGAGCCGAGTTCACTCTCACCATTTCGAGCCT |
| | | TCAACCGGACGATTTCGCCACCTACTACTGCCAGCAGTACCAATCCTACCCTCTGACGTTTGGAGGTGGAACCAAGGTGG |
| | | ACATCAAG |
| 518 | M23 | ATGGCCCTCCCTGTCACCGCCCTGCTGCTTCCGCTGGCTCTTCTGCTCCACGCCGCTCGGCCCCAAGTCCAACTCCAGCA |
| | (Full) | ATCGGGAGCAGAAGTCAAGAAACCAGGCGCATCGGTGAAAGTGTCGTGTAAGGCGTCAGGGTACACCTTCACCAACTACTAT |
| | >XH66- | ATGCACTGGGTGCGCCAGGCTCCAGGCCAGGGGTTGGAGTGGATGGGGATCATCAATCCGTCAGGTGGCTACACCACTTA |
| | 84HE | CGCTCAGAAGTTCCAGGGACGCCTCACTATGACTCGCGATACTAGCACCTCCACGGTGTACATGGAACTGTCATCGCTGA |
| | (M23) | GGTCCGAAGATACCGCCGTCTACTACTGCGCACGGATCAGATCCTGCGGAGGAGATTGTTACTACTTTGACAACTGGGGA |
| | | CAGGGCACCCTTGTTACTGTGTCATCGGGAGGAGGGGGAAGCGGAGGAGGTGGATCAGGCGGCGGTGGCAGCGGGGGCGG |
| | | AGGATCGGACATTCAGCTGACTCAGTCCCCCTCCACTTTGTCGGCCAGCGTGGGAGACAGAGTGACCATCACTTGCCGGG |
| | | CGTCCGAGAACGTCAATATCTGGCTGGCCTGGTACCAGCAAAAGCCTGGAAAAGCCCCGAAGCTGCTCATCTATAAGTCA |
| | | TCCAGCCTGGCGTCTGGTGTGCCGTCGCGGTTCTCCGGCAGCGGGAGCGGAGCCGAGTTCACTCTCACCATTTCGAGCCT |
| | | TCAACCGGACGATTTCGCCACCTACTACTGCCAGCAGTACCAATCCTACCCTCTGACGTTTGGAGGTGGAACCAAGGTGG |
| | | ACATCAAGACCACTACCCCAGCACCGAGGCCACCCACCCCGGCTCCTACCATCGCCTCCCAGCCTCTGTCCCTGCGTCCG |
| | | GAGGCATGTAGACCCGCAGCTGGTGGGGCCGTGCATACCCGGGGTCTTGACTTCGCCTGCGATATCTACATTTGGGCCCC |
| | | TCTGGCTGGTACTTGCGGGGTCCTGCTGCTTTCACTCGTGATCACTCTTTACTGTAAGCGCGGTCGGAAGAAGCTGCTGT |
| | | ACATCTTTAAGCAACCCTTCATGAGGCCTGTGCAGACTACTCAAGAGGAGGACGGCTGTTCATGCCGGTTCCCAGAGGAG |
| | | GAGGAAGGCGGCTGCGAACTGCGCGTGAAATTCAGCCGCAGCGCAGATGCTCCAGCCTACAAGCAGGGGCAGAACCAGCT |
| | | CTACAACGAACTCAATCTTGGTCGGAGAGAGGAGTACGACGTGCTGGACAAGCGGAGAGGACGGGACCCAGAAATGGGCG |
| | | GGAAGCCGCGCAGAAAGAATCCCCAAGAGGGCCTGTACAACGAGCTCCAAAAGGATAAGATGGCAGAAGCCTATAGCGAG |
| | | ATTGGTATGAAAGGGGAACGCAGAAGAGGCAAAGGCCACGACGGACTGTACCAGGGACTCAGCACCGCCACCAAGGACAC |
| | | CTATGACGCTCTTCACATGCAGGCCCTGCCGCCTCGG |
| 519 | M24 | CAAATCACTCTGAAAGAA |
| | (ScFv | TCTGGACCGGCCCTGGTTAAGCCGACTCAAACGCTCACCCTTACTTGCACCTTCAGCGGATTCTCACTCAGCACTGCTGG |
| | domain) | TGTGCACGTCGGATGGATTAGACAGCCGCCTGGAAAGGCCCTGGAATGGCTCGCCCTCATCTCCTGGGCCGATGACAAGA |
| | >NH67- | GATACAGGCCCTCGCTTCGATCCCGGTTGGACATTACCCGGGTGACCTCGAAAGATCAGGTGGTGCTCTCAATGACCAAT |
| | 89CE | ATGCAGCCGGAGGACACCGCTACGTACTACTGCGCACTGCAAGGATTTGACGGCTACGAGGCTAACTGGGGACCAGGTAC |
| | (M24) | TCTGGTCACCGTGAGCTCCGGCGGGGGAGGATCAGGCGGGGGGGGGTCAGGAGGCGGAGGCTCCGGTGGAGGAGGATCGG |
| | | ATATCGTCATGACCCAGTCCCCAAGCTCGCTGAGCGCGTCAGCGGGCGACCGCGTGACTATCACTTGCCGGGCCAGCCGC |
| | | GGCATCTCCTCCGCACTGGCGTGGTACCAGCAGAAGCCTGGAAAACCGCCAAAGCTCCTGATCTATGATGCCTCCAGCCT |
| | | GGAGTCAGGTGTCCCCAGCCGCTTCTCGGGTTCGGGCTCGGGAACCGACTTCACTTTGACCATCGACTCGCTGGAACCGG |
| | | AAGATTTCGCAACCTACTACTGTCAGCAGTCCTACTCGACCCCTTGGACTTTTGGACAAGGGACGAAGGTGGACATCAAG |
| 520 | M24 | ATGGCCCTCCCTGTCACCGCCCTGCTGCTTCCGCTGGCTCTTCTGCTCCACGCCGCTCGGCCCCAAATCACTCTGAAAGA |
| | (Full) | A |
| | >NH67- | TCTGGACCGGCCCTGGTTAAGCCGACTCAAACGCTCACCCTTACTTGCACCTTCAGCGGATTCTCACTCAGCACTGCTGG |
| | 89CE | TGTGCACGTCGGATGGATTAGACAGCCGCCTGGAAAGGCCCTGGAATGGCTCGCCCTCATCTCCTGGGCCGATGACAAGA |
| | (M24) | GATACAGGCCCTCGCTTCGATCCCGGTTGGACATTACCCGGGTGACCTCGAAAGATCAGGTGGTGCTCTCAATGACCAAT |
| | | ATGCAGCCGGAGGACACCGCTACGTACTACTGCGCACTGCAAGGATTTGACGGCTACGAGGCTAACTGGGGACCAGGTAC |
| | | TCTGGTCACCGTGAGCTCCGGCGGGGGAGGATCAGGCGGGGGGGGGTCAGGAGGCGGAGGCTCCGGTGGAGGAGGATCGG |
| | | ATATCGTCATGACCCAGTCCCCAAGCTCGCTGAGCGCGTCAGCGGGCGACCGCGTGACTATCACTTGCCGGGCCAGCCGC |
| | | GGCATCTCCTCCGCACTGGCGTGGTACCAGCAGAAGCCTGGAAAACCGCCAAAGCTCCTGATCTATGATGCCTCCAGCCT |
| | | GGAGTCAGGTGTCCCCAGCCGCTTCTCGGGTTCGGGCTCGGGAACCGACTTCACTTTGACCATCGACTCGCTGGAACCGG |
| | | AAGATTTCGCAACCTACTACTGTCAGCAGTCCTACTCGACCCCTTGGACTTTTGGACAAGGGACGAAGGTGGACATCAAG |
| | | ACCACTACCCCAGCACCGAGGCCACCCACCCCGGCTCCTACCATCGCCTCCCAGCCTCTGTCCCTGCGTCCGGAGGCATG |
| | | TAGACCCGCAGCTGGTGGGGCCGTGCATACCCGGGGTCTTGACTTCGCCTGCGATATCTACATTTGGGCCCCTCTGGCTG |
| | | GTACTTGCGGGGTCCTGCTGCTTTCACTCGTGATCACTCTTTACTGTAAGCGCGGTCGGAAGAAGCTGCTGTACATCTTT |
| | | AAGCAACCCTTCATGAGGCCTGTGCAGACTACTCAAGAGGAGGACGGCTGTTCATGCCGGTTCCCAGAGGAGGAGGAAGG |
| | | CGGCTGCGAACTGCGCGTGAAATTCAGCCGCAGCGCAGATGCTCCAGCCTACAAGCAGGGGCAGAACCAGCTCTACAACG |
| | | AACTCAATCTTGGTCGGAGAGAGGAGTACGACGTGCTGGACAAGCGGAGAGGACGGGACCCAGAAATGGGCGGGAAGCCG |
| | | CGCAGAAAGAATCCCCAAGAGGGCCTGTACAACGAGCTCCAAAAGGATAAGATGGCAGAAGCCTATAGCGAGATTGGTAT |
| | | GAAAGGGGAACGCAGAAGAGGCAAAGGCCACGACGGACTGTACCAGGGACTCAGCACCGCCACCAAGGACACCTATGACG |
| | | CTCTTCACATGCAGGCCCTGCCGCCTCGG |
| 521 | Ss1 | CAAGTCCAGCTCCAGCAGTCGGGCCCAGAGTTGGAGAAGCCTGGGGCGAGCGTGA |
| | (scFv | AGAT |
| | domain) | CTCATGCAAAGCCTCAGGCTACTCCTTTACTGGATACACGATGAATTGGGTGAAAC |
| | | AGT |
| | | CGCATGGAAAGTCACTGGAATGGATCGGTCTGATTACGCCCTACAACGGCGCCTCCAGC |
| | | TACAACCAGAAGTTCAGGGGAAAGGCGACCCTTACTGTCGACAAGTCGTCAAGCA |
| | | CCGC |
| | | CTACATGGACCTCCTGTCCCTGACCTCCGAAGATAGCGCGGTCTACTTTTGTGCACG |
| | | CG |
| | | GAGGTTACGATGGACGGGGATTCGACTACTGGGGCCAGGGAACCACTGTCACCGT |
| | | GTCG |
| | | AGCGGAGGCGGAGGGAGCGGAGGAGGAGGCAGCGGAGGTGGAGGGTCGGATATC |
| | | GAACT |
| | | CACTCAGTCCCCAGCAATCATGTCCGCTTCACCGGGAGAAAAGGTGACCATGACTT |
| | | GCT |
| | | CGGCCTCCTCGTCCGTGTCATACATGCACTGGTACCAACAAAAATCGGGGACCTCC |
| | | CCT |
| | | AAGAGATGGATCTACGATACCAGCAAACTGGCTTCAGGCGTGCCGGGACGCTTCTC |
| | | GGG |
| | | TTCGGGGAGCGGAAATTCGTATTCGTTGACCATTTCGTCCGTGGAAGCCGAGGACG |
| | | ACG |
| | | CAACTTATTACTGCCAACAGTGGTCAGGCTACCCGCTCACTTTCGGAGCCGGCACT |
| | | AAG |
| | | CTGGAGATC |
| 522 | Ss1 | ATGGCCCTCCCTGTCACCGCCCTGCTGCTTCCGCTGGCTCTTCTGCTCCACGCCGCTCG |
| | (full) | GCCCCAAGTCCAGCTCCAGCAGTCGGGCCCAGAGTTGGAGAAGCCTGGGGCGAGCGTGA |
| | | AGATCTCATGCAAAGCCTCAGGCTACTCCTTTACTGGATACACGATGAATTGGGTGAAA |
| | | CAGTCGCATGGAAAGTCACTGGAATGGATCGGTCTGATTACGCCCTACAACGGCGCCTC |
| | | CAGCTACAACCAGAAGTTCAGGGGAAAGGCGACCCTTACTGTCGACAAGTCGTCAAGCA |
| | | CCGCCTACATGGACCTCCTGTCCCTGACCTCCGAAGATAGCGCGGTCTACTTTTGTGCA |
| | | CGCGGAGGTTACGATGGACGGGGATTCGACTACTGGGGCCAGGGAACCACTGTCACCGT |
| | | GTCGAGCGGAGGCGGAGGGAGCGGAGGAGGAGGCAGCGGAGGTGGAGGGTCGGATATCG |
| | | AACTCACTCAGTCCCCAGCAATCATGTCCGCTTCACCGGGAGAAAAGGTGACCATGACT |
| | | TGCTCGGCCTCCTCGTCCGTGTCATACATGCACTGGTACCAACAAAAATCGGGGACCTC |
| | | CCCTAAGAGATGGATCTACGATACCAGCAAACTGGCTTCAGGCGTGCCGGGACGCTTCT |
| | | CGGGTTCGGGGAGCGGAAATTCGTATTCGTTGACCATTTCGTCCGTGGAAGCCGAGGAC |
| | | GACGCAACTTATTACTGCCAACAGTGGTCAGGCTACCCGCTCACTTTCGGAGCCGGCAC |
| | | TAAGCTGGAGATCACCACTACCCCAGCACCGAGGCCACCCACCCCGGCTCCTACCATCG |
| | | CCTCCCAGCCTCTGTCCCTGCGTCCGGAGGCATGTAGACCCGCAGCTGGTGGGGCCGTG |
| | | CATACCCGGGGTCTTGACTTCGCCTGCGATATCTACATTTGGGCCCCTCTGGCTGGTAC |
| | | TTGCGGGGTCCTGCTGCTTTCACTCGTGATCACTCTTTACTGTAAGCGCGGTCGGAAGA |
| | | AGCTGCTGTACATCTTTAAGCAACCCTTCATGAGGCCTGTGCAGACTACTCAAGAGGAG |
| | | GACGGCTGTTCATGCCGGTTCCCAGAGGAGGAGGAAGGCGGCTGCGAACTGCGCGTGAA |
| | | ATTCAGCCGCAGCGCAGATGCTCCAGCC |

[0495] In one embodiment, an antigen binding domain against CD123 is an antigen binding portion, e.g., CDRs, of an antibody, antigen-binding fragment or CAR described in, e.g., PCT publication WO2016/028896. In one embodiment, an antigen binding domain against CD123 is an antigen binding portion, e.g., CDRs, of an antibody, antigen-binding fragment or CAR described in, e.g., PCT publication WO2014/130635. In one embodiment, an antigen binding domain against CD123 is an antigen binding portion, e.g., CDRs, of an antibody, antigen-binding fragment, or CAR described in, e.g., PCT publication WO2014/138805, WO2014/138819, WO2013/173820, WO2014/144622, WO2001/66139, WO2010/126066, WO2014/144622, or US2009/0252742.

[0496] In one embodiment, an antigen binding domain against CD123 is an antigen binding portion, e.g., CDRs, of an antibody, antigen-binding fragment or CAR described in, e.g., US2014/0322212A1 or US2016/0068601A1, both incorporated herein by reference. In embodiments, the CD123 CAR comprises an amino acid, or has a nucleotide sequence shown in US2014/0322212A1 or US2016/0068601A1, both incorporated herein by reference, or a sequence substantially identical to any of the aforesaid sequences (e.g., at least 85%, 90%, 95% or more identical to any of the aforesaid CD123 CAR sequences). In one embodiment, the CAR molecule comprises a CD123 CAR (e.g., any of the CAR1-CAR8), or an antigen binding domain according to Tables 1-2 of WO 2014/130635, incorporated herein by reference, or a sequence substantially identical thereto (e.g., at least 85%, 90%, 95% or more identical to any of the aforesaid CD123 CAR sequences). The amino acid and nucleotide sequences encoding the CD123 CAR molecules and antigen binding domains (e.g., including one, two, three VH CDRs; and one, two, three VL CDRs according to Kabat or Chothia), are specified in WO 2014/130635.

[0497] In other embodiments, the CAR molecule comprises a CD123 CAR comprises a CAR molecule (e.g., any of the CAR123-1 to CAR123-4 and hzCAR123-1 to hzCAR123-32), or an antigen binding domain according to Tables 2, 6, and 9 of WO2016/028896, incorporated herein by reference, or a sequence substantially identical thereto (e.g., at least 85%, 90%, 95% or more identical to any of the aforesaid CD123 CAR sequences). The amino acid and nucleotide sequences encoding the CD123 CAR molecules and antigen binding domains (e.g., including one, two, three VH CDRs; and one, two, three VL CDRs according to Kabat or Chothia), are specified in WO2016/028896.

[0498] In one embodiment, an antigen binding domain against CD22 is an antigen binding portion, e.g., CDRs, of an antibody described in, e.g., Haso et al., Blood, 121(7): 1165-1174 (2013); Wayne et al., Clin Cancer Res 16(6): 1894-1903 (2010); Kato et al., Leuk Res 37(1):83-88 (2013); Creative BioMart (creativebiomart.net): MOM-18047-S(P).

[0499] In one embodiment, an antigen binding domain against CS-1 is an antigen binding portion, e.g., CDRs, of Elotuzumab (BMS), see e.g., Tai et al., 2008, Blood 112(4):1329-37; Tai et al., 2007, Blood. 110(5):1656-63.

[0500] In one embodiment, an antigen binding domain against CLL-1 is an antigen binding portion, e.g., CDRs, of an antibody available from R&D, ebiosciences, Abcam, for example, PE-CLL1-hu Cat #353604 (BioLegend); and PE-CLL1 (CLEC12A) Cat #562566 (BD).

[0501] In other embodiments, the CLL1 CAR includes a CAR molecule, or an antigen binding domain according to Table 2 of WO2016/014535, incorporated herein by reference. The amino acid and nucleotide sequences encoding the CLL-1 CAR molecules and antigen binding domains (e.g., including one, two, three VH CDRs; and one, two, three VL CDRs according to Kabat or Chothia), are specified in WO2016/014535.

[0502] In one embodiment, an antigen binding domain against CD33 is an antigen binding portion, e.g., CDRs, of an antibody described in, e.g., Bross et al., Clin Cancer Res 7(6):1490-1496 (2001) (Gemtuzumab Ozogamicin, hP67.6), Caron et al., Cancer Res 52(24):6761-6767 (1992) (Lintuzumab, HuM195), Lapusan et al., Invest New Drugs 30(3):1121-1131 (2012) (AVE9633), Aigner et al., Leukemia 27(5): 1107-1115 (2013) (AMG330, CD33 BiTE), Dutour et al., Adv hematol 2012:683065 (2012), and Pizzitola et al., Leukemia doi:10.1038/Lue.2014.62 (2014).

[0503] In one embodiment, an antigen binding domain against CD33 is an antigen binding portion, e.g., CDRs, of an antibody described in, US2016/0096892A1, incorporated herein by reference. In embodiments, the CD33 CAR comprises an amino acid, or has a nucleotide sequence shown in US2016/0096892A1, incorporated herein by reference, or a sequence substantially identical to any of the aforesaid sequences (e.g., at least 85%, 90%, 95% or more identical to any of the aforesaid CD33 CAR sequences). In other embodiments, the CD33 CAR CAR or antigen binding domain thereof can include a CAR molecule (e.g., any of CAR33-1 to CAR-33-9), or an antigen binding domain according to Table 2 or 9 of WO2016/014576, incorporated herein by reference, or a sequence substantially identical to any of the aforesaid sequences (e.g., at least 85%, 90%, 95% or more identical to any of the aforesaid CD33 CAR sequences). The amino acid and nucleotide sequences encoding the CD33 CAR molecules and antigen binding domains (e.g., including one, two, three VH CDRs; and one, two, three VL CDRs according to Kabat or Chothia), are specified in WO2016/014576.

[0504] In one embodiment, an antigen binding domain against GD2 is an antigen binding portion, e.g., CDRs, of an antibody described in, e.g., Mujoo et al., Cancer Res. 47(4):1098-1104 (1987); Cheung et al., Cancer Res 45(6):2642-2649 (1985), Cheung et al., J Clin Oncol 5(9):1430-1440 (1987), Cheung et al., J Clin Oncol 16(9):3053-3060 (1998), Handgretinger et al., Cancer Immunol Immunother 35(3):199-204 (1992). In some embodiments, an antigen binding domain against GD2 is an antigen binding portion of an antibody selected from mAb 14.18, 14G2a, ch14.18, hu14.18, 3F8, hu3F8, 3G6, 8B6, 60C3, 10B8, ME36.1, and 8H9, see e.g., WO2012033885, WO2013040371, WO2013192294, WO2013061273, WO2013123061, WO2013074916, and WO201385552. In some embodiments, an antigen binding domain against GD2 is an antigen binding portion of an antibody described in US Publication No.: 20100150910 or PCT Publication No.: WO 2011160119.

[0505] In one embodiment, an antigen binding domain against BCMA is an antigen binding portion, e.g., CDRs, of an antibody, antigen-binding fragment or CAR described in, e.g., PCT publication WO2016/014565, e.g., the antigen binding portion of CAR BCMA-10 as described in WO2016/014565. In one embodiment, an antigen binding domain against BCMA is an antigen binding portion, e.g., CDRs, of an antibody, antigen-binding fragment or CAR described in, e.g., PCT publication WO2016/014789. In one embodiment, an antigen binding domain against BCMA is an antigen binding portion, e.g., CDRs, of an antibody described in, e.g., WO2012/163805, WO2001/12812, and WO2003/062401.

[0506] In other embodiment, the CAR molecule comprises a BCMA CAR molecule, or an antigen binding domain against BCMA described herein, e.g., a BCMA CAR described in US-2016-0046724-A1 or WO2016/014565. In embodiments, the BCMA CAR comprises an amino acid, or has a nucleotide sequence of a CAR molecule, or an antigen binding domain according to US-2016-0046724-A1, or Table 1 or 16, SEQ ID NO: 271 or SEQ ID NO: 273 of WO2016/014565, incorporated herein by reference, or a sequence substantially identical to any of the aforesaid sequences (e.g., at least 85%, 90%, 95% or more identical to any of the aforesaid BCMA CAR sequences). The amino acid and nucleotide sequences encoding the BCMA CAR molecules and antigen binding domains (e.g., including one, two, three VH CDRs; and one, two, three VL CDRs according to Kabat or Chothia), are specified in WO2016/014565.

[0507] In one embodiment, an antigen binding domain against GFR ALPHA-4 CAR antigen is an antigen binding portion, e.g., CDRs, of an antibody described in, e.g., WO2016/025880, incorporated herein by reference. In one embodiment, the CAR molecule comprises an a GFR ALPHA-4 CAR, e.g., a CAR molecule, or an antigen binding domain according to Table 2 of WO2016/025880, incorporated herein by reference, or a sequence substantially identical to any of the aforesaid sequences (e.g., at least 85%, 90%, 95% or more identical to any of the aforesaid GFR ALPHA-4 sequences). The amino acid and nucleotide sequences encoding the GFR ALPHA-4 CAR molecules and antigen binding domains (e.g., including one, two, three VH CDRs; and one, two, three VL CDRs according to Kabat or Chothia), are specified in WO2016/025880.

[0508] In one embodiment, an antigen binding domain against Tn antigen is an antigen binding portion, e.g., CDRs, of an antibody described in, e.g., U.S. Pat. No. 8,440,798; Brooks et al., PNAS 107(22):10056-10061 (2010), and Stone et al., OncoImmunology 1(6):863-873(2012).

[0509] In one embodiment, an antigen binding domain against PSMA is an antigen binding portion, e.g., CDRs, of an antibody described in, e.g., Parker et al., Protein Expr Purif 89(2):136-145 (2013), US 20110268656 (J591 ScFv); Frigerio et al, European J Cancer 49(9):2223-2232 (2013) (scFvD2B); WO 2006125481 (mAbs 3/A12, 3/E7 and 3/F11) and single chain antibody fragments (scFv A5 and D7).

[0510] In one embodiment, an antigen binding domain against ROR1 is an antigen binding portion, e.g., CDRs, of an antibody described in, e.g., Hudecek et al., Clin Cancer Res 19(12):3153-3164 (2013); WO 2011159847; and US20130101607.

[0511] In one embodiment, an antigen binding domain against FLT3 is an antigen binding portion, e.g., CDRs, of an antibody described in, e.g., WO2011076922, U.S. Pat. No. 5,777,084, EP0754230, US20090297529, and several commercial catalog antibodies (R&D, ebiosciences, Abcam).

[0512] In one embodiment, an antigen binding domain against TAG72 is an antigen binding portion, e.g., CDRs, of an antibody described in, e.g., Hombach et al., Gastroenterology 113(4):1163-1170 (1997); and Abcam ab691.

[0513] In one embodiment, an antigen binding domain against FAP is an antigen binding portion, e.g., CDRs, of an antibody described in, e.g., Ostermann et al., Clinical Cancer Research 14:4584-4592 (2008) (FAP5), US Pat. Publication No. 2009/0304718; sibrotuzumab (see e.g., Hofheinz et al., Oncology Research and Treatment 26(1), 2003); and Tran et al., J Exp Med 210(6):1125-1135 (2013).

[0514] In one embodiment, an antigen binding domain against CD38 is an antigen binding portion, e.g., CDRs, of daratumumab (see, e.g., Groen et al., Blood 116(21):1261-1262 (2010); MOR202 (see, e.g., U.S. Pat. No. 8,263,746); or antibodies described in U.S. Pat. No. 8,362,211.

[0515] In one embodiment, an antigen binding domain against CD44v6 is an antigen binding portion, e.g., CDRs, of an antibody described in, e.g., Casucci et al., Blood 122(20):3461-3472 (2013).

[0516] In one embodiment, an antigen binding domain against CEA is an antigen binding portion, e.g., CDRs, of an antibody described in, e.g., Chmielewski et al., Gastroenterology 143(4):1095-1107 (2012).

[0517] In one embodiment, an antigen binding domain against EPCAM is an antigen binding portion, e.g., CDRS, of an antibody selected from MT110, EpCAM-CD3 bispecific Ab (see, e.g., clinicaltrials.gov/ct2/show/NCT00635596); Edrecolomab; 3622W94; ING-1; and adecatumumab (MT201).

[0518] In one embodiment, an antigen binding domain against PRSS21 is an antigen binding portion, e.g., CDRs, of an antibody described in U.S. Pat. No. 8,080,650.

[0519] In one embodiment, an antigen binding domain against B7H3 is an antigen binding portion, e.g., CDRs, of an antibody MGA271 (Macrogenics).

[0520] In one embodiment, an antigen binding domain against KIT is an antigen binding portion, e.g., CDRs, of an antibody described in, e.g., U.S. Pat. No. 7,915,391, US20120288506, and several commercial catalog antibodies.

[0521] In one embodiment, an antigen binding domain against IL-13Ra2 is an antigen binding portion, e.g., CDRs, of an antibody described in, e.g., WO2008/146911, WO2004087758, several commercial catalog antibodies, and WO2004087758.

[0522] In one embodiment, an antigen binding domain against CD30 is an antigen binding portion, e.g., CDRs, of an antibody described in, e.g., U.S. Pat. No. 7,090,843 B1, and EP0805871.

[0523] In one embodiment, an antigen binding domain against GD3 is an antigen binding portion, e.g., CDRs, of an antibody described in, e.g., U.S. Pat. Nos. 7,253,263; 8,207,308; US 20120276046; EP1013761; WO2005035577; and U.S. Pat. No. 6,437,098.

[0524] In one embodiment, an antigen binding domain against CD171 is an antigen binding portion, e.g., CDRs, of an antibody described in, e.g., Hong et al., J Immunother 37(2):93-104 (2014).

[0525] In one embodiment, an antigen binding domain against IL-11Ra is an antigen binding portion, e.g., CDRs, of an antibody available from Abcam (cat #ab55262) or Novus Biologicals (cat #EPR5446). In another embodiment, an antigen binding domain again IL-11Ra is a peptide, see, e.g., Huang et al., Cancer Res 72(1):271-281 (2012).

[0526] In one embodiment, an antigen binding domain against PSCA is an antigen binding portion, e.g., CDRs, of an antibody described in, e.g., Morgenroth et al., Prostate 67(10):1121-1131 (2007) (scFv 7F5); Nejatollahi et al., J of Oncology 2013(2013), article ID 839831 (scFv C5-II); and US Pat Publication No. 20090311181.

[0527] In one embodiment, an antigen binding domain against VEGFR2 is an antigen binding portion, e.g., CDRs, of an antibody described in, e.g., Chinnasamy et al., J Clin Invest 120(11):3953-3968 (2010).

[0528] In one embodiment, an antigen binding domain against LewisY is an antigen binding portion, e.g., CDRs, of an antibody described in, e.g., Kelly et al., Cancer Biother Radiopharm 23(4):411-423 (2008) (hu3S193 Ab (scFvs)); Dolezal et al., Protein Engineering 16(1):47-56 (2003) (NC10 scFv).

[0529] In one embodiment, an antigen binding domain against CD24 is an antigen binding portion, e.g., CDRs, of an antibody described in, e.g., Maliar et al., Gastroenterology 143(5):1375-1384 (2012).

[0530] In one embodiment, an antigen binding domain against PDGFR-beta is an antigen binding portion, e.g., CDRs, of an antibody Abcam ab32570.

[0531] In one embodiment, an antigen binding domain against SSEA-4 is an antigen binding portion, e.g., CDRs, of antibody MC813 (Cell Signaling), or other commercially available antibodies.

[0532] In one embodiment, an antigen binding domain against CD20 is an antigen binding portion, e.g., CDRs, of the antibody Rituximab, Ofatumumab, Ocrelizumab, Veltuzumab, or GA101.

[0533] In one embodiment, an antigen binding domain against Folate receptor alpha is an antigen binding portion, e.g., CDRs, of the antibody IMGN853, or an antibody described in US20120009181; U.S. Pat. No. 4,851,332, LK26: U.S. Pat. No. 5,952,484.

[0534] In one embodiment, an antigen binding domain against ERBB2 (Her2/neu) is an antigen binding portion, e.g., CDRs, of the antibody trastuzumab, or pertuzumab.

[0535] In one embodiment, an antigen binding domain against MUC1 is an antigen binding portion, e.g., CDRs, of the antibody SAR566658.

[0536] In one embodiment, the antigen binding domain against EGFR is antigen binding portion, e.g., CDRs, of the antibody cetuximab, panitumumab, zalutumumab, nimotuzumab, or matuzumab.

[0537] In one embodiment, an antigen binding domain against NCAM is an antigen binding portion, e.g., CDRs, of the antibody clone 2-2B: MAB5324 (EMD Millipore).

[0538] In one embodiment, an antigen binding domain against Ephrin B2 is an antigen binding portion, e.g., CDRs, of an antibody described in, e.g., Abengozar et al., Blood 119(19):4565-4576 (2012).

[0539] In one embodiment, an antigen binding domain against IGF-I receptor is an antigen binding portion, e.g., CDRs, of an antibody described in, e.g., U.S. Pat. No. 8,344,112 B2; EP2322550 A1; WO 2006/138315, or PCT/US2006/022995.

[0540] In one embodiment, an antigen binding domain against CAIX is an antigen binding portion, e.g., CDRs, of the antibody clone 303123 (R&D Systems).

[0541] In one embodiment, an antigen binding domain against LMP2 is an antigen binding portion, e.g., CDRs, of an antibody described in, e.g., U.S. Pat. No. 7,410,640, or US20050129701.

[0542] In one embodiment, an antigen binding domain against gp100 is an antigen binding portion, e.g., CDRs, of the antibody HMB45, NKIbetaB, or an antibody described in WO2013165940, or US20130295007

[0543] In one embodiment, an antigen binding domain against tyrosinase is an antigen binding portion, e.g., CDRs, of an antibody described in, e.g., U.S. Pat. No. 5,843,674; or US19950504048.

[0544] In one embodiment, an antigen binding domain against EphA2 is an antigen binding portion, e.g., CDRs, of an antibody described in, e.g., Yu et al., Mol Ther 22(1):102-111 (2014).

[0545] In one embodiment, an antigen binding domain against GD3 is an antigen binding portion, e.g., CDRs, of an antibody described in, e.g., U.S. Pat. Nos. 7,253,263; 8,207,308; US 20120276046; EP1013761 A3; 20120276046; WO2005035577; or U.S. Pat. No. 6,437,098.

[0546] In one embodiment, an antigen binding domain against fucosyl GM1 is an antigen binding portion, e.g., CDRs, of an antibody described in, e.g., US20100297138; or WO2007/067992.

[0547] In one embodiment, an antigen binding domain against sLe is an antigen binding portion, e.g., CDRs, of the antibody G193 (for lewis Y), see Scott A M et al, Cancer Res 60: 3254-61 (2000), also as described in Neeson et al, J Immunol May 2013 190 (Meeting Abstract Supplement) 177.10.

[0548] In one embodiment, an antigen binding domain against GM3 is an antigen binding portion, e.g., CDRs, of the antibody CA 2523449 (mAb 14F7).

[0549] In one embodiment, an antigen binding domain against HMWMAA is an antigen binding portion, e.g., CDRs, of an antibody described in, e.g., Kmiecik et al., Oncoimmunology 3(1):e27185 (2014) (PMID: 24575382) (mAb9.2.27); U.S. Pat. No. 6,528,481; WO2010033866; or US 20140004124.

[0550] In one embodiment, an antigen binding domain against o-acetyl-GD2 is an antigen binding portion, e.g., CDRs, of the antibody 8B6.

[0551] In one embodiment, an antigen binding domain against TEM1/CD248 is an antigen binding portion, e.g., CDRs, of an antibody described in, e.g., Marty et al., Cancer Lett 235(2):298-308 (2006); Zhao et al., J Immunol Methods 363(2):221-232 (2011).

[0552] In one embodiment, an antigen binding domain against CLDN6 is an antigen binding portion, e.g., CDRs, of the antibody IMAB027 (Ganymed Pharmaceuticals), see e.g., clinicaltrial.gov/show/NCT02054351.

[0553] In one embodiment, an antigen binding domain against TSHR is an antigen binding portion, e.g., CDRs, of an antibody described in, e.g., U.S. Pat. No. 8,603,466; U.S. Pat. No. 8,501,415; or U.S. Pat. No. 8,309,693.

[0554] In one embodiment, an antigen binding domain against GPRC5D is an antigen binding portion, e.g., CDRs, of the antibody FAB6300A (R&D Systems); or LS-A4180 (Lifespan Biosciences).

[0555] In one embodiment, an antigen binding domain against CD97 is an antigen binding portion, e.g., CDRs, of an antibody described in, e.g., U.S. Pat. No. 6,846,911;de Groot et al., J Immunol 183(6):4127-4134 (2009); or an antibody from R&D:MAB3734.

[0556] In one embodiment, an antigen binding domain against ALK is an antigen binding portion, e.g., CDRs, of an antibody described in, e.g., Mino-Kenudson et al., Clin Cancer Res 16(5):1561-1571 (2010).

[0557] In one embodiment, an antigen binding domain against polysialic acid is an antigen binding portion, e.g., CDRs, of an antibody described in, e.g., Nagae et al., J Biol Chem 288(47):33784-33796 (2013).

[0558] In one embodiment, an antigen binding domain against PLAC1 is an antigen binding portion, e.g., CDRs, of an antibody described in, e.g., Ghods et al., Biotechnol Appl Biochem 2013 doi:10.1002/bab.1177.

[0559] In one embodiment, an antigen binding domain against GloboH is an antigen binding portion of the antibody VK9; or an antibody described in, e.g., Kudryashov V et al, Glycoconj J. 15(3):243-9 (1998), Lou et al., Proc Natl Acad Sci USA 111(7):2482-2487 (2014); MBr1: Bremer E-G et al. J Biol Chem 259:14773-14777 (1984).

[0560] In one embodiment, an antigen binding domain against NY-BR-1 is an antigen binding portion, e.g., CDRs of an antibody described in, e.g., Jager et al., Appl Immunohistochem Mol Morphol 15(1):77-83 (2007).

[0561] In one embodiment, an antigen binding domain against WT-1 is an antigen binding portion, e.g., CDRs, of an antibody described in, e.g., Dao et al., Sci Transl Med 5(176):176ra33 (2013); or WO2012/135854.

[0562] In one embodiment, an antigen binding domain against MAGE-A1 is an antigen binding portion, e.g., CDRs, of an antibody described in, e.g., Willemsen et al., J Immunol 174(12):7853-7858 (2005) (TCR-like scFv).

[0563] In one embodiment, an antigen binding domain against sperm protein 17 is an antigen binding portion, e.g., CDRs, of an antibody described in, e.g., Song et al., Target Oncol 2013 Aug. 14 (PMID: 23943313); Song et al., Med Oncol 29(4):2923-2931 (2012).

[0564] In one embodiment, an antigen binding domain against Tie 2 is an antigen binding portion, e.g., CDRs, of the antibody AB33 (Cell Signaling Technology).

[0565] In one embodiment, an antigen binding domain against MAD-CT-2 is an antigen binding portion, e.g., CDRs, of an antibody described in, e.g., PMID: 2450952; U.S. Pat. No. 7,635,753.

[0566] In one embodiment, an antigen binding domain against Fos-related antigen 1 is an antigen binding portion, e.g., CDRs, of the antibody 12F9 (Novus Biologicals).

[0567] In one embodiment, an antigen binding domain against MelanA/MART1 is an antigen binding portion, e.g., CDRs, of an antibody described in, EP2514766 A2; or U.S. Pat. No. 7,749,719.

[0568] In one embodiment, an antigen binding domain against sarcoma translocation breakpoints is an antigen binding portion, e.g., CDRs, of an antibody described in, e.g., Luo et al, EMBO Mol. Med. 4(6):453-461 (2012).

[0569] In one embodiment, an antigen binding domain against TRP-2 is an antigen binding portion, e.g., CDRs, of an antibody described in, e.g., Wang et al, J Exp Med. 184(6):2207-16 (1996).

[0570] In one embodiment, an antigen binding domain against CYP1B1 is an antigen binding portion, e.g., CDRs, of an antibody described in, e.g., Maecker et al, Blood 102 (9): 3287-3294 (2003).

[0571] In one embodiment, an antigen binding domain against RAGE-1 is an antigen binding portion, e.g., CDRs, of the antibody MAB5328 (EMD Millipore).

[0572] In one embodiment, an antigen binding domain against human telomerase reverse transcriptase is an antigen binding portion, e.g., CDRs, of the antibody cat no: LS-B95-100 (Lifespan Biosciences)

[0573] In one embodiment, an antigen binding domain against intestinal carboxyl esterase is an antigen binding portion, e.g., CDRs, of the antibody 4F12: cat no: LS-B6190-50 (Lifespan Biosciences).

[0574] In one embodiment, an antigen binding domain against mut hsp70-2 is an antigen binding portion, e.g., CDRs, of the antibody Lifespan Biosciences: monoclonal: cat no: LS-C133261-100 (Lifespan Biosciences).

[0575] In one embodiment, an antigen binding domain against CD79a is an antigen binding portion, e.g., CDRs, of the antibody Anti-CD79a antibody [HM47/A9] (ab3121), available from Abcam; antibody CD79A Antibody #3351 available from Cell Signaling Technology; or antibody HPA017748-Anti-CD79A antibody produced in rabbit, available from Sigma Aldrich.

[0576] In one embodiment, an antigen binding domain against CD79b is an antigen binding portion, e.g., CDRs, of the antibody polatuzumab vedotin, anti-CD79b described in Dornan et al., “Therapeutic potential of an anti-CD79b antibody-drug conjugate, anti-CD79b-vc-MMAE, for the treatment of non-Hodgkin lymphoma” Blood. 2009 Sep. 24; 114(13):2721-9. doi: 10.1182/blood-2009-02-205500. Epub 2009 Jul. 24, or the bispecific antibody Anti-CD79b/CD3 described in “4507 Pre-Clinical Characterization of T Cell-Dependent Bispecific Antibody Anti-CD79b/CD3 As a Potential Therapy for B Cell Malignancies” Abstracts of 56^{th} ASH Annual Meeting and Exposition, San Francisco, Calif. Dec. 6-9 2014.

[0577] In one embodiment, an antigen binding domain against CD72 is an antigen binding portion, e.g., CDRs, of the antibody J3-109 described in Myers, and Uckun, “An anti-CD72 immunotoxin against therapy-refractory B-lineage acute lymphoblastic leukemia.” Leuk Lymphoma. 1995 June; 18(1-2):119-22, or anti-CD72 (10D6.8.1, mIgG1) described in Polson et al., “Antibody-Drug Conjugates for the Treatment of Non-Hodgkin's Lymphoma: Target and Linker-Drug Selection” Cancer Res Mar. 15, 2009 69; 2358.

[0578] In one embodiment, an antigen binding domain against LAIR1 is an antigen binding portion, e.g., CDRs, of the antibody ANT-301 LAIR1 antibody, available from ProSpec; or anti-human CD305 (LAIR1) Antibody, available from BioLegend.

[0579] In one embodiment, an antigen binding domain against FCAR is an antigen binding portion, e.g., CDRs, of the antibody CD89/FCARAntibody (Catalog #10414-H08H), available from Sino Biological Inc.

[0580] In one embodiment, an antigen binding domain against LILRA2 is an antigen binding portion, e.g., CDRs, of the antibody LILRA2 monoclonal antibody (M17), clone 3C7, available from Abnova, or Mouse Anti-LILRA2 antibody, Monoclonal (2D7), available from Lifespan Biosciences.

[0581] In one embodiment, an antigen binding domain against CD300LF is an antigen binding portion, e.g., CDRs, of the antibody Mouse Anti-CMRF35-like molecule 1 antibody, Monoclonal[UP-D2], available from BioLegend, or Rat Anti-CMRF35-like molecule 1 antibody, Monoclonal[234903], available from R&D Systems.

[0582] In one embodiment, an antigen binding domain against CLEC12A is an antigen binding portion, e.g., CDRs, of the antibody Bispecific T cell Engager (BiTE) scFv-antibody and ADC described in Noordhuis et al., “Targeting of CLEC12A In Acute Myeloid Leukemia by Antibody-Drug-Conjugates and Bispecific CLL-1xCD3 BiTE Antibody” 53^{rd} ASH Annual Meeting and Exposition, Dec. 10-13, 2011, and MCLA-117 (Merus).

[0583] In one embodiment, an antigen binding domain against BST2 (also called CD317) is an antigen binding portion, e.g., CDRs, of the antibody Mouse Anti-CD317 antibody, Monoclonal[3H4], available from Antibodies-Online or Mouse Anti-CD317 antibody, Monoclonal[696739], available from R&D Systems.

[0584] In one embodiment, an antigen binding domain against EMR2 (also called CD312) is an antigen binding portion, e.g., CDRs, of the antibody Mouse Anti-CD312 antibody, Monoclonal[LS-B8033] available from Lifespan Biosciences, or Mouse Anti-CD312 antibody, Monoclonal[494025] available from R&D Systems.

[0585] In one embodiment, an antigen binding domain against LY75 is an antigen binding portion, e.g., CDRs, of the antibody Mouse Anti-Lymphocyte antigen 75 antibody, Monoclonal[HD30] available from EMD Millipore or Mouse Anti-Lymphocyte antigen 75 antibody, Monoclonal[A15797] available from Life Technologies.

[0586] In one embodiment, an antigen binding domain against GPC3 is an antigen binding portion, e.g., CDRs, of the antibody hGC33 described in Nakano K, Ishiguro T, Konishi H, et al. Generation of a humanized anti-glypican 3 antibody by CDR grafting and stability optimization. Anticancer Drugs. 2010 November; 21(10):907-916, or MDX-1414, HN3, or YP7, all three of which are described in Feng et al., “Glypican-3 antibodies: a new therapeutic target for liver cancer.” FEBS Lett. 2014 Jan. 21; 588(2):377-82.

[0587] In one embodiment, an antigen binding domain against FCRL5 is an antigen binding portion, e.g., CDRs, of the anti-FcRL5 antibody described in Elkins et al., “FcRL5 as a target of antibody-drug conjugates for the treatment of multiple myeloma” Mol Cancer Ther. 2012 October; 11(10):2222-32.

[0588] In one embodiment, an antigen binding domain against IGLL1 is an antigen binding portion, e.g., CDRs, of the antibody Mouse Anti-Immunoglobulin lambda-like polypeptide 1 antibody, Monoclonal[AT1G4] available from Lifespan Biosciences, Mouse Anti-Immunoglobulin lambda-like polypeptide 1 antibody, Monoclonal[HSL11] available from BioLegend.

[0589] In one embodiment, the antigen binding domain comprises one, two three (e.g., all three) heavy chain CDRs, HC CDR1, HC CDR2 and HC CDR3, from an antibody listed above, and/or one, two, three (e.g., all three) light chain CDRs, LC CDR1, LC CDR2 and LC CDR3, from an antibody listed above. In one embodiment, the antigen binding domain comprises a heavy chain variable region and/or a variable light chain region of an antibody listed above.

[0590] In another aspect, the antigen binding domain comprises a humanized antibody or an antibody fragment. In some aspects, a non-human antibody is humanized, where specific sequences or regions of the antibody are modified to increase similarity to an antibody naturally produced in a human or fragment thereof. In one aspect, the antigen binding domain is humanized.

### Bispecific CARS

[0591] In an embodiment a multispecific antibody molecule is a bispecific antibody molecule. A bispecific antibody has specificity for no more than two antigens. A bispecific antibody molecule is characterized by a first immunoglobulin variable domain sequence which has binding specificity for a first epitope and a second immunoglobulin variable domain sequence that has binding specificity for a second epitope. In an embodiment the first and second epitopes are on the same antigen, e.g., the same protein (or subunit of a multimeric protein). In an embodiment the first and second epitopes overlap. In an embodiment the first and second epitopes do not overlap. In an embodiment the first and second epitopes are on different antigens, e.g., different proteins (or different subunits of a multimeric protein). In an embodiment a bispecific antibody molecule comprises a heavy chain variable domain sequence and a light chain variable domain sequence which have binding specificity for a first epitope and a heavy chain variable domain sequence and a light chain variable domain sequence which have binding specificity for a second epitope. In an embodiment a bispecific antibody molecule comprises a half antibody having binding specificity for a first epitope and a half antibody having binding specificity for a second epitope. In an embodiment a bispecific antibody molecule comprises a half antibody, or fragment thereof, having binding specificity for a first epitope and a half antibody, or fragment thereof, having binding specificity for a second epitope. In an embodiment a bispecific antibody molecule comprises a scFv, or fragment thereof, have binding specificity for a first epitope and a scFv, or fragment thereof, have binding specificity for a second epitope.

[0592] In certain embodiments, the antibody molecule is a multi-specific (e.g., a bispecific or a trispecific) antibody molecule. Protocols for generating bispecific or heterodimeric antibody molecules are known in the art; including but not limited to, for example, the “knob in a hole” approach described in, e.g., U.S. Pat. No. 5,731,168; the electrostatic steering Fc pairing as described in, e.g., WO 09/089004, WO 06/106905 and WO 2010/129304; Strand Exchange Engineered Domains (SEED) heterodimer formation as described in, e.g., WO 07/110205; Fab arm exchange as described in, e.g., WO 08/119353, WO 2011/131746, and WO 2013/060867; double antibody conjugate, e.g., by antibody cross-linking to generate a bi-specific structure using a heterobifunctional reagent having an amine-reactive group and a sulfhydryl reactive group as described in, e.g., U.S. Pat. No. 4,433,059; bispecific antibody determinants generated by recombining half antibodies (heavy-light chain pairs or Fabs) from different antibodies through cycle of reduction and oxidation of disulfide bonds between the two heavy chains, as described in, e.g., U.S. Pat. No. 4,444,878; trifunctional antibodies, e.g., three Fab′ fragments cross-linked through sulfhdryl reactive groups, as described in, e.g., U.S. Pat. No. 5,273,743; biosynthetic binding proteins, e.g., pair of scFvs cross-linked through C-terminal tails preferably through disulfide or amine-reactive chemical cross-linking, as described in, e.g., U.S. Pat. No. 5,534,254; bifunctional antibodies, e.g., Fab fragments with different binding specificities dimerized through leucine zippers (e.g., c-fos and c-jun) that have replaced the constant domain, as described in, e.g., U.S. Pat. No. 5,582,996; bispecific and oligospecific mono-and oligovalent receptors, e.g., VH-CH1 regions of two antibodies (two Fab fragments) linked through a polypeptide spacer between the CH1 region of one antibody and the VH region of the other antibody typically with associated light chains, as described in, e.g., U.S. Pat. No. 5,591,828; bispecific DNA-antibody conjugates, e.g., crosslinking of antibodies or Fab fragments through a double stranded piece of DNA, as described in, e.g., U.S. Pat. No. 5,635,602; bispecific fusion proteins, e.g., an expression construct containing two scFvs with a hydrophilic helical peptide linker between them and a full constant region, as described in, e.g., U.S. Pat. No. 5,637,481; multivalent and multispecific binding proteins, e.g., dimer of polypeptides having first domain with binding region of Ig heavy chain variable region, and second domain with binding region of Ig light chain variable region, generally termed diabodies (higher order structures are also encompassed creating for bispecifc, trispecific, or tetraspecific molecules, as described in, e.g., U.S. Pat. No. 5,837,242; minibody constructs with linked VL and VH chains further connected with peptide spacers to an antibody hinge region and CH3 region, which can be dimerized to form bispecific/multivalent molecules, as described in, e.g., U.S. Pat. No. 5,837,821; VH and VL domains linked with a short peptide linker (e.g., 5 or 10 amino acids) or no linker at all in either orientation, which can form dimers to form bispecific diabodies; trimers and tetramers, as described in, e.g., U.S. Pat. No. 5,844,094; String of VH domains (or VL domains in family members) connected by peptide linkages with crosslinkable groups at the C-terminus further associated with VL domains to form a series of FVs (or scFvs), as described in, e.g., U.S. Pat. No. 5,864,019; and single chain binding polypeptides with both a VH and a VL domain linked through a peptide linker are combined into multivalent structures through non-covalent or chemical crosslinking to form, e.g., homobivalent, heterobivalent, trivalent, and tetravalent structures using both scFV or diabody type format, as described in, e.g., U.S. Pat. No. 5,869,620. Additional exemplary multispecific and bispecific molecules and methods of making the same are found, for example, in U.S. Pat. Nos. 5,910,573, 5,932,448, 5,959,083, 5,989,830, 6,005,079, 6,239,259, 6,294,353, 6,333,396, 6,476,198, 6,511,663, 6,670,453, 6,743,896, 6,809,185, 6,833,441, 7,129,330, 7,183,076, 7,521,056, 7,527,787, 7,534,866, 7,612,181, US2002004587A1, US2002076406A1, US2002103345A1, US2003207346A1, US2003211078A1, US2004219643A1, US2004220388A1, US2004242847A1, US2005003403A1, US2005004352A1, US2005069552A1, US2005079170A1, US2005100543A1, US2005136049A1, US2005136051A1, US2005163782A1, US2005266425A1, US2006083747A1, US2006120960A1, US2006204493A1, US2006263367A1, US2007004909A1, US2007087381A1, US2007128150A1, US2007141049A1, US2007154901A1, US2007274985A1, US2008050370A1, US2008069820A1, US2008152645A1, US2008171855A1, US2008241884A1, US2008254512A1, US2008260738A1, US2009130106A1, US2009148905A1, US2009155275A1, US2009162359A1, US2009162360A1, US2009175851A1, US2009175867A1, US2009232811A1, US2009234105A1, US2009263392A1, US2009274649A1, EP346087A2, WO0006605A2, WO02072635A2, WO04081051A1, WO06020258A2, WO2007044887A2, WO2007095338A2, WO2007137760A2, WO2008119353A1, WO2009021754A2, WO2009068630A1, WO9103493A1, WO9323537A1, WO9409131A1, WO9412625A2, WO9509917A1, WO9637621A2, WO9964460A1. The contents of the above-referenced applications are incorporated herein by reference in their entireties.

[0593] Within each antibody or antibody fragment (e.g., scFv) of a bispecific antibody molecule, the VH can be upstream or downstream of the VL. In some embodiments, the upstream antibody or antibody fragment (e.g., scFv) is arranged with its VH (VH₁) upstream of its VL (VL₁) and the downstream antibody or antibody fragment (e.g., scFv) is arranged with its VL (VL₂) upstream of its VH (VH₂), such that the overall bispecific antibody molecule has the arrangement VH₁-VL₁-VL₂-VH₂. In other embodiments, the upstream antibody or antibody fragment (e.g., scFv) is arranged with its VL (VL₁) upstream of its VH (VH₁) and the downstream antibody or antibody fragment (e.g., scFv) is arranged with its VH (VH₂) upstream of its VL (VL₂), such that the overall bispecific antibody molecule has the arrangement VL₁-VH₁-VH₂-VL₂. Optionally, a linker is disposed between the two antibodies or antibody fragments (e.g., scFvs), e.g., between VL₁ and VL₂ if the construct is arranged as VH₁-VL₁-VL₂-VH₂, or between VH₁ and VH₂ if the construct is arranged as VL₁-VH₁-VH₂-VL₂. The linker may be a linker as described herein, e.g., a (Gly₄-Ser)ₙ linker, wherein n is 1, 2, 3, 4, 5, or 6, preferably 4 (SEQ ID NO: 78). In general, the linker between the two scFvs should be long enough to avoid mispairing between the domains of the two scFvs. Optionally, a linker is disposed between the VL and VH of the first scFv. Optionally, a linker is disposed between the VL and VH of the second scFv. In constructs that have multiple linkers, any two or more of the linkers can be the same or different. Accordingly, in some embodiments, a bispecific CAR comprises VLs, VHs, and optionally one or more linkers in an arrangement as described herein.

### Stability and Mutations

[0594] The stability of an antigen binding domain to a cancer associated antigen as described herein, e.g., scFv molecules (e.g., soluble scFv), can be evaluated in reference to the biophysical properties (e.g., thermal stability) of a conventional control scFv molecule or a full length antibody. In one embodiment, the humanized scFv has a thermal stability that is greater than about 0.1, about 0.25, about 0.5, about 0.75, about 1, about 1.25, about 1.5, about 1.75, about 2, about 2.5, about 3, about 3.5, about 4, about 4.5, about 5, about 5.5, about 6, about 6.5, about 7, about 7.5, about 8, about 8.5, about 9, about 9.5, about 10 degrees, about 11 degrees, about 12 degrees, about 13 degrees, about 14 degrees, or about 15 degrees Celsius than a control binding molecule (e.g. a conventional scFv molecule) in the described assays.

[0595] The improved thermal stability of the antigen binding domain to a cancer associated antigen described herein, e.g., scFv is subsequently conferred to the entire CAR construct, leading to improved therapeutic properties of the CAR construct. The thermal stability of the antigen binding domain of—a cancer associated antigen described herein, e.g., scFv, can be improved by at least about 2° C. or 3° C. as compared to a conventional antibody. In one embodiment, the antigen binding domain of-a cancer associated antigen described herein, e.g., scFv, has a 1° C. improved thermal stability as compared to a conventional antibody. In another embodiment, the antigen binding domain of a cancer associated antigen described herein, e.g., scFv, has a 2° C. improved thermal stability as compared to a conventional antibody. In another embodiment, the scFv has a 4, 5, 6, 7, 8, 9, 10, 11, 12, 13, 14, 15° C. improved thermal stability as compared to a conventional antibody. Comparisons can be made, for example, between the scFv molecules disclosed herein and scFv molecules or Fab fragments of an antibody from which the scFv VH and VL were derived. Thermal stability can be measured using methods known in the art. For example, in one embodiment, Tm can be measured. Methods for measuring Tm and other methods of determining protein stability are described in more detail below.

[0596] Mutations in scFv (arising through humanization or direct mutagenesis of the soluble scFv) can alter the stability of the scFv and improve the overall stability of the scFv and the CAR construct. Stability of the humanized scFv is compared against the murine scFv using measurements such as Tm, temperature denaturation and temperature aggregation.

[0597] The binding capacity of the mutant scFvs can be determined using assays know in the art and described herein.

[0598] In one embodiment, the antigen binding domain of a cancer associated antigen described herein, e.g., scFv, comprises at least one mutation arising from the humanization process such that the mutated scFv confers improved stability to the CAR construct. In another embodiment, the antigen binding domain of—a cancer associated antigen described herein, e.g., scFv, comprises at least 1, 2, 3, 4, 5, 6, 7, 8, 9, 10 mutations arising from the humanization process such that the mutated scFv confers improved stability to the CAR construct.

### Methods of Evaluating Protein Stability

[0599] The stability of an antigen binding domain may be assessed using, e.g., the methods described below. Such methods allow for the determination of multiple thermal unfolding transitions where the least stable domain either unfolds first or limits the overall stability threshold of a multidomain unit that unfolds cooperatively (e.g., a multidomain protein which exhibits a single unfolding transition). The least stable domain can be identified in a number of additional ways. Mutagenesis can be performed to probe which domain limits the overall stability. Additionally, protease resistance of a multidomain protein can be performed under conditions where the least stable domain is known to be intrinsically unfolded via DSC or other spectroscopic methods (Fontana, et al., (1997) Fold. Des., 2: R17-26; Dimasi et al. (2009) J. Mol. Biol. 393: 672-692). Once the least stable domain is identified, the sequence encoding this domain (or a portion thereof) may be employed as a test sequence in the methods.

### Thermal Stability

[0600] The thermal stability of the compositions may be analyzed using a number of non-limiting biophysical or biochemical techniques known in the art. In certain embodiments, thermal stability is evaluated by analytical spectroscopy.

[0601] An exemplary analytical spectroscopy method is Differential Scanning calorimetry (DSC). DSC employs a calorimeter which is sensitive to the heat absorbances that accompany the unfolding of most proteins or protein domains (see, e.g. Sanchez-Ruiz, et al., Biochemistry, 27: 1648-52, 1988). To determine the thermal stability of a protein, a sample of the protein is inserted into the calorimeter and the temperature is raised until the Fab or scFv unfolds. The temperature at which the protein unfolds is indicative of overall protein stability.

[0602] Another exemplary analytical spectroscopy method is Circular Dichroism (CD) spectroscopy. CD spectrometry measures the optical activity of a composition as a function of increasing temperature. Circular dichroism (CD) spectroscopy measures differences in the absorption of left-handed polarized light versus right-handed polarized light which arise due to structural asymmetry. A disordered or unfolded structure results in a CD spectrum very different from that of an ordered or folded structure. The CD spectrum reflects the sensitivity of the proteins to the denaturing effects of increasing temperature and is therefore indicative of a protein's thermal stability (see van Mierlo and Steemsma, J. Biotechnol., 79(3):281-98, 2000).

[0603] Another exemplary analytical spectroscopy method for measuring thermal stability is Fluorescence Emission Spectroscopy (see van Mierlo and Steemsma, supra). Yet another exemplary analytical spectroscopy method for measuring thermal stability is Nuclear Magnetic Resonance (NMR) spectroscopy (see, e.g. van Mierlo and Steemsma, supra). The thermal stability of a composition can be measured biochemically. An exemplary biochemical method for assessing thermal stability is a thermal challenge assay. In a “thermal challenge assay”, a composition is subjected to a range of elevated temperatures for a set period of time. For example, in one embodiment, test scFv molecules or molecules comprising scFv molecules are subject to a range of increasing temperatures, e.g., for 1-1.5 hours. The activity of the protein is then assayed by a relevant biochemical assay. For example, if the protein is a binding protein (e.g. an scFv or scFv-containing polypeptide) the binding activity of the binding protein may be determined by a functional or quantitative ELISA.

[0604] Such an assay may be done in a high-throughput format and those disclosed in the Examples using E. coli and high throughput screening. A library of antigen binding domains, e.g., that includes an antigen binding domain to—a cancer associated antigen described herein, e.g., scFv variants, may be created using methods known in the art. Antigen binding domain, e.g., to—a cancer associated antigen described herein, e.g., scFv, expression may be induced and the antigen binding domain, e.g., to—a cancer associated antigen described herein, e.g., scFv, may be subjected to thermal challenge. The challenged test samples may be assayed for binding and those antigen binding domains to—a cancer associated antigen described herein, e.g., scFvs, which are stable may be scaled up and further characterized.

[0605] Thermal stability is evaluated by measuring the melting temperature (Tm) of a composition using any of the above techniques (e.g. analytical spectroscopy techniques). The melting temperature is the temperature at the midpoint of a thermal transition curve wherein 50% of molecules of a composition are in a folded state (See e.g., Dimasi et al. (2009) J. Mol Biol. 393: 672-692). In one embodiment, Tm values for an antigen binding domain to—a cancer associated antigen described herein, e.g., scFv, are about 40° C., 41° C., 42° C., 43° C., 44° C., 45° C., 46° C., 47° C., 48° C., 49° C., 50° C., 51° C., 52° C., 53° C., 54° C., 55° C., 56° C., 57° C., 58° C., 59° C., 60° C., 61° C., 62° C., 63° C., 64° C., 65° C., 66° C., 67° C., 68° C., 69° C., 70° C., 71° C., 72° C., 73° C., 74° C., 75° C., 76° C., 77° C., 78° C., 79° C., 80° C., 81° C., 82° C., 83° C., 84° C., 85° C., 86° C., 87° C., 88° C., 89° C., 90° C., 91° C., 92° C., 93° C., 94° C., 95° C., 96° C., 97° C., 98° C., 99° C., 100° C. In one embodiment, Tm values for an IgG is about 40° C., 41° C., 42° C., 43° C., 44° C., 45° C., 46° C., 47° C., 48° C., 49° C., 50° C., 51° C., 52° C., 53° C., 54° C., 55° C., 56° C., 57° C., 58° C., 59° C., 60° C., 61° C., 62° C., 63° C., 64° C., 65° C., 66° C., 67° C., 68° C., 69° C., 70° C., 71° C., 72° C., 73° C., 74° C., 75° C., 76° C., 77° C., 78° C., 79° C., 80° C., 81° C., 82° C., 83° C., 84° C., 85° C., 86° C., 87° C., 88° C., 89° C., 90° C., 91° C., 92° C., 93° C., 94° C., 95° C., 96° C., 97° C., 98° C., 99° C., 100° C. In one embodiment, Tm values for an multivalent antibody is about 40° C., 41° C., 42° C., 43° C., 44° C., 45° C., 46° C., 47° C., 48° C., 49° C., 50° C., 51° C., 52° C., 53° C., 54° C., 55° C., 56° C., 57° C., 58° C., 59° C., 60° C., 61° C., 62° C., 63° C., 64° C., 65° C., 66° C., 67° C., 68° C., 69° C., 70° C., 71° C., 72° C., 73° C., 74° C., 75° C., 76° C., 77° C., 78° C., 79° C., 80° C., 81° C., 82° C., 83° C., 84° C., 85° C., 86° C., 87° C., 88° C., 89° C., 90° C., 91° C., 92° C., 93° C., 94° C., 95° C., 96° C., 97° C., 98° C., 99° C., 100° C.

[0606] Thermal stability is also evaluated by measuring the specific heat or heat capacity (Cp) of a composition using an analytical calorimetric technique (e.g. DSC). The specific heat of a composition is the energy (e.g. in kcal/mol) is required to rise by 1° C., the temperature of 1 mol of water. As large Cp is a hallmark of a denatured or inactive protein composition. The change in heat capacity (ΔCp) of a composition is measured by determining the specific heat of a composition before and after its thermal transition. Thermal stability may also be evaluated by measuring or determining other parameters of thermodynamic stability including Gibbs free energy of unfolding (AG), enthalpy of unfolding (ΔH), or entropy of unfolding (ΔS). One or more of the above biochemical assays (e.g. a thermal challenge assay) are used to determine the temperature (i.e. the T_{C} value) at which 50% of the composition retains its activity (e.g. binding activity).

[0607] In addition, mutations to the antigen binding domain of a cancer associated antigen described herein, e.g., scFv, can be made to alter the thermal stability of the antigen binding domain of a cancer associated antigen described herein, e.g., scFv, as compared with the unmutated antigen binding domain of a cancer associated antigen described herein, e.g., scFv. When the humanized antigen binding domain of a cancer associated antigen described herein, e.g., scFv, is incorporated into a CAR construct, the antigen binding domain of the cancer associated antigen described herein, e.g., humanized scFv, confers thermal stability to the overall CARs of the present invention. In one embodiment, the antigen binding domain to a cancer associated antigen described herein, e.g., scFv, comprises a single mutation that confers thermal stability to the antigen binding domain of the cancer associated antigen described herein, e.g., scFv. In another embodiment, the antigen binding domain to a cancer associated antigen described herein, e.g., scFv, comprises multiple mutations that confer thermal stability to the antigen binding domain to the cancer associated antigen described herein, e.g., scFv. In one embodiment, the multiple mutations in the antigen binding domain to a cancer associated antigen described herein, e.g., scFv, have an additive effect on thermal stability of the antigen binding domain to the cancer associated antigen described herein binding domain, e.g., scFv.

### b) % Aggregation

[0608] The stability of a composition can be determined by measuring its propensity to aggregate. Aggregation can be measured by a number of non-limiting biochemical or biophysical techniques. For example, the aggregation of a composition may be evaluated using chromatography, e.g. Size-Exclusion Chromatography (SEC). SEC separates molecules on the basis of size. A column is filled with semi-solid beads of a polymeric gel that will admit ions and small molecules into their interior but not large ones. When a protein composition is applied to the top of the column, the compact folded proteins (i.e. non-aggregated proteins) are distributed through a larger volume of solvent than is available to the large protein aggregates. Consequently, the large aggregates move more rapidly through the column, and in this way the mixture can be separated or fractionated into its components. Each fraction can be separately quantified (e.g. by light scattering) as it elutes from the gel. Accordingly, the % aggregation of a composition can be determined by comparing the concentration of a fraction with the total concentration of protein applied to the gel. Stable compositions elute from the column as essentially a single fraction and appear as essentially a single peak in the elution profile or chromatogram.

### c) Binding Affinity

[0609] The stability of a composition can be assessed by determining its target binding affinity. A wide variety of methods for determining binding affinity are known in the art. An exemplary method for determining binding affinity employs surface plasmon resonance. Surface plasmon resonance is an optical phenomenon that allows for the analysis of real-time biospecific interactions by detection of alterations in protein concentrations within a biosensor matrix, for example using the BIAcore system (Pharmacia Biosensor AB, Uppsala, Sweden and Piscataway, N.J.). For further descriptions, see Jonsson, U., et al. (1993) Ann. Biol. Clin. 51:19-26; Jonsson, U., i (1991) Biotechniques 11:620-627; Johnsson, B., et al. (1995) J. Mol. Recognit. 8:125-131; and Johnnson, B., et al. (1991) Anal. Biochem. 198:268-277.

[0610] In one aspect, the antigen binding domain of the CAR comprises an amino acid sequence that is homologous to an antigen binding domain amino acid sequence described herein, and the antigen binding domain retains the desired functional properties of the antigen binding domain described herein.

[0611] In one specific aspect, the CAR composition of the invention comprises an antibody fragment. In a further aspect, the antibody fragment comprises an scFv.

[0612] In various aspects, the antigen binding domain of the CAR is engineered by modifying one or more amino acids within one or both variable regions (e.g., VH and/or VL), for example within one or more CDR regions and/or within one or more framework regions. In one specific aspect, the CAR composition of the invention comprises an antibody fragment. In a further aspect, the antibody fragment comprises an scFv.

[0613] It will be understood by one of ordinary skill in the art that the antibody or antibody fragment of the invention may further be modified such that they vary in amino acid sequence (e.g., from wild-type), but not in desired activity. For example, additional nucleotide substitutions leading to amino acid substitutions at “non-essential” amino acid residues may be made to the protein For example, a nonessential amino acid residue in a molecule may be replaced with another amino acid residue from the same side chain family In another embodiment, a string of amino acids can be replaced with a structurally similar string that differs in order and/or composition of side chain family members, e.g., a conservative substitution, in which an amino acid residue is replaced with an amino acid residue having a similar side chain, may be made.

[0614] Families of amino acid residues having similar side chains have been defined in the art, including basic side chains (e.g., lysine, arginine, histidine), acidic side chains (e.g., aspartic acid, glutamic acid), uncharged polar side chains (e.g., glycine, asparagine, glutamine, serine, threonine, tyrosine, cysteine), nonpolar side chains (e.g., alanine, valine, leucine, isoleucine, proline, phenylalanine, methionine, tryptophan), beta-branched side chains (e.g., threonine, valine, isoleucine) and aromatic side chains (e.g., tyrosine, phenylalanine, tryptophan, histidine).

[0615] Percent identity in the context of two or more nucleic acids or polypeptide sequences, refers to two or more sequences that are the same. Two sequences are “substantially identical” if two sequences have a specified percentage of amino acid residues or nucleotides that are the same (e.g., 60% identity, optionally 70%, 71%. 72%. 73%, 74%, 75%, 76%, 77%, 78%, 79%, 80%,81%, 82%, 83%, 84%, 85%, 86%, 87%, 88%, 89%, 90%, 91%, 92%, 93%, 94%, 95%, 96%, 97%, 98%, 99% identity over a specified region, or, when not specified, over the entire sequence), when compared and aligned for maximum correspondence over a comparison window, or designated region as measured using one of the following sequence comparison algorithms or by manual alignment and visual inspection. Optionally, the identity exists over a region that is at least about 50 nucleotides (or 10 amino acids) in length, or more preferably over a region that is 100 to 500 or 1000 or more nucleotides (or 20, 50, 200 or more amino acids) in length.

[0616] For sequence comparison, typically one sequence acts as a reference sequence, to which test sequences are compared. When using a sequence comparison algorithm, test and reference sequences are entered into a computer, subsequence coordinates are designated, if necessary, and sequence algorithm program parameters are designated. Default program parameters can be used, or alternative parameters can be designated. The sequence comparison algorithm then calculates the percent sequence identities for the test sequences relative to the reference sequence, based on the program parameters. Methods of alignment of sequences for comparison are well known in the art. Optimal alignment of sequences for comparison can be conducted, e.g., by the local homology algorithm of Smith and Waterman, (1970) Adv. Appl. Math. 2:482c, by the homology alignment algorithm of Needleman and Wunsch, (1970) J. Mol. Biol. 48:443, by the search for similarity method of Pearson and Lipman, (1988) Proc. Nat'l. Acad. Sci. USA 85:2444, by computerized implementations of these algorithms (GAP, BESTFIT, FASTA, and TFASTA in the Wisconsin Genetics Software Package, Genetics Computer Group, 575 Science Dr., Madison, Wis.), or by manual alignment and visual inspection (see, e.g., Brent et al., (2003) Current Protocols in Molecular Biology).

[0617] Two examples of algorithms that are suitable for determining percent sequence identity and sequence similarity are the BLAST and BLAST 2.0 algorithms, which are described in Altschul et al., (1977) Nuc. Acids Res. 25:3389-3402; and Altschul et al., (1990) J. Mol. Biol. 215:403-410, respectively. Software for performing BLAST analyses is publicly available through the National Center for Biotechnology Information.

[0618] The percent identity between two amino acid sequences can also be determined using the algorithm of E. Meyers and W. Miller, (1988) Comput. Appl. Biosci. 4:11-17) which has been incorporated into the ALIGN program (version 2.0), using a PAM120 weight residue table, a gap length penalty of 12 and a gap penalty of 4. In addition, the percent identity between two amino acid sequences can be determined using the Needleman and Wunsch (1970) J. Mol. Biol. 48:444-453) algorithm which has been incorporated into the GAP program in the GCG software package (available at www.gcg.com), using either a Blossom 62 matrix or a PAM250 matrix, and a gap weight of 16, 14, 12, 10, 8, 6, or 4 and a length weight of 1, 2, 3, 4, 5, or 6.

[0619] In one aspect, the present invention contemplates modifications of the starting antibody or fragment (e.g., scFv) amino acid sequence that generate functionally equivalent molecules. For example, the VH or VL of an antigen binding domain to—a cancer associated antigen described herein, e.g., scFv, comprised in the CAR can be modified to retain at least about 70%, 71%. 72%. 73%, 74%, 75%, 76%, 77%, 78%, 79%, 80%,81%, 82%, 83%, 84%, 85%, 86%, 87%, 88%, 89%, 90%, 91%, 92%, 93%, 94%, 95%, 96%, 97%, 98%, 99% identity of the starting VH or VL framework region of the antigen binding domain to the cancer associated antigen described herein, e.g., scFv. The present invention contemplates modifications of the entire CAR construct, e.g., modifications in one or more amino acid sequences of the various domains of the CAR construct in order to generate functionally equivalent molecules. The CAR construct can be modified to retain at least about 70%, 71%. 72%. 73%, 74%, 75%, 76%, 77%, 78%, 79%, 80%, 81%, 82%, 83%, 84%, 85%, 86%, 87%, 88%, 89%, 90%, 91%, 92%, 93%, 94%, 95%, 96%, 97%, 98%, 99% identity of the starting CAR construct.

### Transmembrane Domain

[0620] With respect to the transmembrane domain, in various embodiments, a CAR can be designed to comprise a transmembrane domain that is attached to the extracellular domain of the CAR. A transmembrane domain can include one or more additional amino acids adjacent to the transmembrane region, e.g., one or more amino acid associated with the extracellular region of the protein from which the transmembrane was derived (e.g., 1, 2, 3, 4, 5, 6, 7, 8, 9, 10 up to 15 amino acids of the extracellular region) and/or one or more additional amino acids associated with the intracellular region of the protein from which the transmembrane protein is derived (e.g., 1, 2, 3, 4, 5, 6, 7, 8, 9, 10 up to 15 amino acids of the intracellular region). In one aspect, the transmembrane domain is one that is associated with one of the other domains of the CAR e.g., in one embodiment, the transmembrane domain may be from the same protein that the signaling domain, costimulatory domain or the hinge domain is derived from. In another aspect, the transmembrane domain is not derived from the same protein that any other domain of the CAR is derived from. In some instances, the transmembrane domain can be selected or modified by amino acid substitution to avoid binding of such domains to the transmembrane domains of the same or different surface membrane proteins, e.g., to minimize interactions with other members of the receptor complex. In one aspect, the transmembrane domain is capable of homodimerization with another CAR on the cell surface of a CAR-expressing cell. In a different aspect, the amino acid sequence of the transmembrane domain may be modified or substituted so as to minimize interactions with the binding domains of the native binding partner present in the same CAR-expressing cell.

[0621] The transmembrane domain may be derived either from a natural or from a recombinant source. Where the source is natural, the domain may be derived from any membrane-bound or transmembrane protein. In one aspect the transmembrane domain is capable of signaling to the intracellular domain(s) whenever the CAR has bound to a target. A transmembrane domain of particular use in this invention may include at least the transmembrane region(s) of e.g., the alpha, beta or zeta chain of the T-cell receptor, CD28, CD27, CD3 epsilon, CD45, CD4, CD5, CD8, CD9, CD16, CD22, CD33, CD37, CD64, CD80, CD86, CD134, CD137, CD154. In some embodiments, a transmembrane domain may include at least the transmembrane region(s) of, e.g., KIRDS2, OX40, CD2, CD27, LFA-1 (CD11a, CD18), ICOS (CD278), 4-1BB (CD137), GITR, CD40, BAFFR, HVEM (LIGHTR), SLAMF7, NKp80 (KLRF1), NKp44, NKp30, NKp46, CD160, CD19, IL2R beta, IL2R gamma, IL7Rα, ITGA1, VLA1, CD49a, ITGA4, IA4, CD49D, ITGA6, VLA-6, CD49f, ITGAD, CD11d, ITGAE, CD103, ITGAL, CD11a, LFA-1, ITGAM, CD11b, ITGAX, CD11c, ITGB1, CD29, ITGB2, CD18, LFA-1, ITGB7, TNFR2, DNAM1 (CD226), SLAMF4 (CD244, 2B4), CD84, CD96 (Tactile), CEACAM1, CRTAM, Ly9 (CD229), CD160 (BY55), PSGL1, CD100 (SEMA4D), SLAMF6 (NTB-A, Ly108), SLAM (SLAMF1, CD150, IPO-3), BLAME (SLAMF8), SELPLG (CD162), LTBR, PAG/Cbp, NKG2D, NKG2C, or a functional variant thereof.

[0622] In some instances, the transmembrane domain can be attached to the extracellular region of the CAR, e.g., the antigen binding domain of the CAR, via a hinge, e.g., a hinge from a human protein. For example, in one embodiment, the hinge can be a human Ig (immunoglobulin) hinge (e.g., an IgG4 hinge, an IgD hinge), a GS linker (e.g., a GS linker described herein), a KIR2DS2 hinge or a CD8a hinge. In one embodiment, the hinge or spacer comprises (e.g., consists of) the amino acid sequence of SEQ ID NO:403. In one aspect, the transmembrane domain comprises (e.g., consists of) a transmembrane domain of SEQ ID NO: 12.

[0623] In one aspect, the hinge or spacer comprises an IgG4 hinge. For example, in one embodiment, the hinge or spacer comprises a hinge of the amino acid sequence ESKYGPPCPPCPAPEFLGGPSVFLFPPKPKDTLMISRTPEVTCVVVDVSQEDPEVQFN WYVDGVEVHNAKTKPREEQFNSTYRVVSVLTVLHQDWLNGKEYKCKVSNKGLPS SIEKTISKAKGQPREPQVYTLPPSQEEMTKNQVSLTCLVKGFYPSDIAVEWESNGQP ENNYKTTPPVLDSDGSFFLYSRLTVDKSRWQEGNVFSCSVMHEALHNHYTQKSLS LSLGKM (SEQ ID NO:405). In some embodiments, the hinge or spacer comprises a hinge encoded by a nucleotide sequence of GAGAGCAAGTACGGCCCTCCCTGCCCCCCTTGCCCTGCCCCCGAGTTCCTGGGC GGACCCAGCGTGTTCCTGTTCCCCCCCAAGCCCAAGGACACCCTGATGATCAGC CGGACCCCCGAGGTGACCTGTGTGGTGGTGGACGTGTCCCAGGAGGACCCCGA GGTCCAGTTCAACTGGTACGTGGACGGCGTGGAGGTGCACAACGCCAAGACCA AGCCCCGGGAGGAGCAGTTCAATAGCACCTACCGGGTGGTGTCCGTGCTGACC GTGCTGCACCAGGACTGGCTGAACGGCAAGGAATACAAGTGTAAGGTGTCCAA CAAGGGCCTGCCCAGCAGCATCGAGAAAACCATCAGCAAGGCCAAGGGCCAGC CTCGGGAGCCCCAGGTGTACACCCTGCCCCCTAGCCAAGAGGAGATGACCAAG AACCAGGTGTCCCTGACCTGCCTGGTGAAGGGCTTCTACCCCAGCGACATCGCC GTGGAGTGGGAGAGCAACGGCCAGCCCGAGAACAACTACAAGACCACCCCCCC TGTGCTGGACAGCGACGGCAGCTTCTTCCTGTACAGCCGGCTGACCGTGGACAA GAGCCGGTGGCAGGAGGGCAACGTCTTTAGCTGCTCCGTGATGCACGAGGCCC TGCACAACCACTACACCCAGAAGAGCCTGAGCCTGTCCCTGGGCAAGATG (SEQ ID NO:406).

[0624] In one aspect, the hinge or spacer comprises an IgD hinge. For example, in one embodiment, the hinge or spacer comprises a hinge of the amino acid sequence RWPESPKAQASSVPTAQPQAEGSLAKATTAPATTRNTGRGGEEKKKEKEKEEQEE RETKTPECPSHTQPLGVYLLTPAVQDLWLRDKATFTCFVVGSDLKDAHLTWEVAG KVPTGGVEEGLLERHSNGSQSQHSRLTLPRSLWNAGTSVTCTLNHPSLPPQRLMAL REPAAQAPVKLSLNLLASSDPPEAASWLLCEVSGFSPPNILLMWLEDQREVNTSGF APARPPPQPGSTTFWAWSVLRVPAPPSPQPATYTCVVSHEDSRTLLNASRSLEVSYV TDH (SEQ ID NO:407). In some embodiments, the hinge or spacer comprises a hinge encoded by a nucleotide sequence of AGGTGGCCCGAAAGTCCCAAGGCCCAGGCATCTAGTGTTCCTACTGCACAGCCC CAGGCAGAAGGCAGCCTAGCCAAAGCTACTACTGCACCTGCCACTACGCGCAA TACTGGCCGTGGCGGGGAGGAGAAGAAAAAGGAGAAAGAGAAAGAAGAACAG GAAGAGAGGGAGACCAAGACCCCTGAATGTCCATCCCATACCCAGCCGCTGGG CGTCTATCTCTTGACTCCCGCAGTACAGGACTTGTGGCTTAGAGATAAGGCCAC CTTTACATGTTTCGTCGTGGGCTCTGACCTGAAGGATGCCCATTTGACTTGGGA GGTTGCCGGAAAGGTACCCACAGGGGGGGTTGAGGAAGGGTTGCTGGAGCGCC ATTCCAATGGCTCTCAGAGCCAGCACTCAAGACTCACCCTTCCGAGATCCCTGT GGAACGCCGGGACCTCTGTCACATGTACTCTAAATCATCCTAGCCTGCCCCCAC AGCGTCTGATGGCCCTTAGAGAGCCAGCCGCCCAGGCACCAGTTAAGCTTAGCC TGAATCTGCTCGCCAGTAGTGATCCCCCAGAGGCCGCCAGCTGGCTCTTATGCG AAGTGTCCGGCTTTAGCCCGCCCAACATCTTGCTCATGTGGCTGGAGGACCAGC GAGAAGTGAACACCAGCGGCTTCGCTCCAGCCCGGCCCCCACCCCAGCCGGGT TCTACCACATTCTGGGCCTGGAGTGTCTTAAGGGTCCCAGCACCACCTAGCCCC CAGCCAGCCACATACACCTGTGTTGTGTCCCATGAAGATAGCAGGACCCTGCTA AATGCTTCTAGGAGTCTGGAGGTTTCCTACGTGACTGACCATT (SEQ ID NO:408).

[0625] In one aspect, the transmembrane domain may be recombinant, in which case it will comprise predominantly hydrophobic residues such as leucine and valine. In one aspect a triplet of phenylalanine, tryptophan and valine can be found at each end of a recombinant transmembrane domain.

[0626] Optionally, a short oligo- or polypeptide linker, between 2 and 10 amino acids in length may form the linkage between the transmembrane domain and the cytoplasmic region of the CAR. A glycine-serine doublet provides a particularly suitable linker. For example, in one aspect, the linker comprises the amino acid sequence of GGGGSGGGGS (SEQ ID NO:10). In some embodiments, the linker is encoded by a nucleotide sequence of GGTGGCGGAGGTTCTGGAGGTGGAGGTTCC (SEQ ID NO:11).

[0627] In one aspect, the hinge or spacer comprises a KIR2DS2 hinge.

### Cytoplasmic Domain

[0628] The cytoplasmic domain or region of the CAR includes an intracellular signaling domain. An intracellular signaling domain is generally responsible for activation of at least one of the normal effector functions of the immune cell in which the CAR has been introduced. The term “effector function” refers to a specialized function of a cell. Effector function of a T cell, for example, may be cytolytic activity or helper activity including the secretion of cytokines. Thus the term “intracellular signaling domain” refers to the portion of a protein which transduces the effector function signal and directs the cell to perform a specialized function. While usually the entire intracellular signaling domain can be employed, in many cases it is not necessary to use the entire chain. To the extent that a truncated portion of the intracellular signaling domain is used, such truncated portion may be used in place of the intact chain as long as it transduces the effector function signal. The term intracellular signaling domain is thus meant to include any truncated portion of the intracellular signaling domain sufficient to transduce the effector function signal.

[0629] Examples of intracellular signaling domains for use in the CAR of the invention include the cytoplasmic sequences of the T cell receptor (TCR) and co-receptors that act in concert to initiate signal transduction following antigen receptor engagement, as well as any derivative or variant of these sequences and any recombinant sequence that has the same functional capability.

[0630] It is known that signals generated through the TCR alone are insufficient for full activation of the T cell and that a secondary and/or costimulatory signal is also required. Thus, T cell activation can be said to be mediated by two distinct classes of cytoplasmic signaling sequences: those that initiate antigen-dependent primary activation through the TCR (primary intracellular signaling domains) and those that act in an antigen-independent manner to provide a secondary or costimulatory signal (secondary cytoplasmic domain, e.g., a costimulatory domain).

[0631] A primary signaling domain regulates primary activation of the TCR complex either in a stimulatory way, or in an inhibitory way. Primary intracellular signaling domains that act in a stimulatory manner may contain signaling motifs which are known as immunoreceptor tyrosine-based activation motifs or ITAMs.

[0632] Examples of ITAM containing primary intracellular signaling domains that are of particular use in the invention include those of CD3 zeta, common FcR gamma (FCER1G), Fc gamma RIIa, FcR beta (Fc Epsilon R1b), CD3 gamma, CD3 delta, CD3 epsilon, CD79a, CD79b, DAP10, and DAP12, or a functional variant thereof. In one embodiment, a CAR of the invention comprises an intracellular signaling domain, e.g., a primary signaling domain of CD3-zeta, or a functional variant thereof.

[0633] In one embodiment, a primary signaling domain comprises a modified ITAM domain, e.g., a mutated ITAM domain which has altered (e.g., increased or decreased) activity as compared to the native ITAM domain. In one embodiment, a primary signaling domain comprises a modified ITAM-containing primary intracellular signaling domain, e.g., an optimized and/or truncated ITAM-containing primary intracellular signaling domain. In an embodiment, a primary signaling domain comprises one, two, three, four or more ITAM motifs.

[0634] The intracellular signaling domain of the CAR can comprise the CD3-zeta signaling domain by itself or it can be combined with any other desired intracellular signaling domain(s) useful in the context of a CAR of the invention. For example, the intracellular signaling domain of the CAR can comprise a CD3 zeta chain portion and a costimulatory signaling domain. The costimulatory signaling domain refers to a portion of the CAR comprising the intracellular domain of a costimulatory molecule. A costimulatory molecule is a cell surface molecule other than an antigen receptor or its ligands that is required for an efficient response of lymphocytes to an antigen. Examples of such molecules include CD27, CD28, 4-1BB (CD137), OX40, CD28-OX40, CD28-4-1BB, CD30, CD40, PD-1, ICOS, lymphocyte function-associated antigen-1 (LFA-1), CD2, CD7, LIGHT, NKG2C, B7-H3, and a ligand that specifically binds with CD83, and the like. For example, CD27 costimulation has been demonstrated to enhance expansion, effector function, and survival of human CART cells in vitro and augments human T cell persistence and antitumor activity in vivo (Song et al. Blood. 2012; 119(3):696-706). Further examples of such costimulatory molecules include CD5, ICAM-1, GITR, BAFFR, HVEM (LIGHTR), SLAMF7, NKp80 (KLRF1), NKp44, NKp30, NKp46, CD160, CD19, CD4, CD8alpha, CD8beta, IL2R beta, IL2R gamma, IL7R alpha, ITGA4, VLA1, CD49a, ITGA4, IA4, CD49D, ITGA6, VLA-6, CD49f, ITGAD, CD11d, ITGAE, CD103, ITGAL, CD11a, LFA-1, ITGAM, CD11b, ITGAX, CD11c, ITGB1, CD29, ITGB2, CD18, LFA-1, ITGB7, TNFR2, TRANCE/RANKL, DNAM1 (CD226), SLAMF4 (CD244, 2B4), CD84, CD96 (Tactile), NKG2D, CEACAM1, CRTAM, Ly9 (CD229), CD160 (BY55), PSGL1, CD100 (SEMA4D), CD69, SLAMF6 (NTB-A, Ly108), SLAM (SLAMF1, CD150, IPO-3), BLAME (SLAMF8), SELPLG (CD162), LTBR, LAT, GADS, SLP-76, PAG/Cbp, and CD19a.

[0635] The intracellular signaling sequences within the cytoplasmic portion of the CAR of the invention may be linked to each other in a random or specified order. Optionally, a short oligo- or polypeptide linker, for example, between 2 and 10 amino acids (e.g., 2, 3, 4, 5, 6, 7, 8, 9, or 10 amino acids) in length may form the linkage between intracellular signaling sequence. In one embodiment, a glycine-serine doublet can be used as a suitable linker. In one embodiment, a single amino acid, e.g., an alanine, a glycine, can be used as a suitable linker.

[0636] In one aspect, the intracellular signaling domain is designed to comprise two or more, e.g., 2, 3, 4, 5, or more, costimulatory signaling domains. In an embodiment, the two or more, e.g., 2, 3, 4, 5, or more, costimulatory signaling domains, are separated by a linker molecule, e.g., a linker molecule described herein. In one embodiment, the intracellular signaling domain comprises two costimulatory signaling domains. In some embodiments, the linker molecule is a glycine residue. In some embodiments, the linker is an alanine residue.

[0637] In one aspect, the intracellular signaling domain is designed to comprise the signaling domain of CD3-zeta and the signaling domain of CD28, or a functional variant thereof. In one aspect, the intracellular signaling domain is designed to comprise the signaling domain of CD3-zeta, the signaling domain of CD28, and the signaling domain of 4-1BB, or a functional variant thereof. In one aspect, the signaling domain of 4-1BB is a signaling domain of SEQ ID NO: 14. In one aspect, the signaling domain of CD3-zeta is a signaling domain of SEQ ID NO: 18. In one aspect, the signaling domain of CD28 is selected from SEQ ID NOs: 427-430, as described herein.

[0638] In one aspect, the intracellular signaling domain is designed to comprise the signaling domain of CD3-zeta, the signaling domain of CD28, and the signaling domain of CD27, or a functional variant thereof. In one aspect, the signaling domain of CD27 comprises an amino acid sequence of QRRKYRSNKGESPVEPAEPCRYSCPREEEGSTIPIQEDYRKPEPACSP (SEQ ID NO:16). In one aspect, the signaling domain of CD27 is encoded by a nucleic acid sequence of AGGAGTAAGAGGAGCAGGCTCCTGCACAGTGACTACATGAACATGACTCCCCG CCGCCCCGGGCCCACCCGCAAGCATTACCAGCCCTATGCCCCACCACGCGACTT CGCAGCCTATCGCTCC (SEQ ID NO:17).

[0639] In one aspect, the CAR-expressing cell described herein can further comprise a second CAR, e.g., a second CAR that includes a different antigen binding domain, e.g., to the same target or a different target (e.g., a target other than a cancer associated antigen described herein or a different cancer associated antigen described herein). In one embodiment, the second CAR includes an antigen binding domain to a target expressed the same cancer cell type as the cancer associated antigen. In one embodiment, the CAR-expressing cell comprises a first CAR that targets a first antigen and includes an intracellular signaling domain having a costimulatory signaling domain but not a primary signaling domain, and a second CAR that targets a second, different, antigen and includes an intracellular signaling domain having a primary signaling domain but not a costimulatory signaling domain. While not wishing to be bound by theory, placement of a costimulatory signaling domain, e.g., 4-1BB, CD28, CD27 or OX-40, onto the first CAR, and the primary signaling domain, e.g., CD3 zeta, on the second CAR can limit the CAR activity to cells where both targets are expressed. In one embodiment, the CAR expressing cell comprises a first cancer associated antigen CAR that includes an antigen binding domain that binds a target antigen described herein, a transmembrane domain and a costimulatory domain and a second CAR that targets a different target antigen (e.g., an antigen expressed on that same cancer cell type as the first target antigen) and includes an antigen binding domain, a transmembrane domain and a primary signaling domain. In another embodiment, the CAR expressing cell comprises a first CAR that includes an antigen binding domain that binds a target antigen described herein, a transmembrane domain and a primary signaling domain and a second CAR that targets an antigen other than the first target antigen (e.g., an antigen expressed on the same cancer cell type as the first target antigen) and includes an antigen binding domain to the antigen, a transmembrane domain and a costimulatory signaling domain.

[0640] In one embodiment, the CAR-expressing cell comprises an XCAR described herein and an inhibitory CAR. In one embodiment, the inhibitory CAR comprises an antigen binding domain that binds an antigen found on normal cells but not cancer cells, e.g., normal cells that also express CLL. In one embodiment, the inhibitory CAR comprises the antigen binding domain, a transmembrane domain and an intracellular domain of an inhibitory molecule. For example, the intracellular domain of the inhibitory CAR can be an intracellular domain of PD1, PD-L1, CTLA4, TIM3, CEACAM (e.g., CEACAM-1, CEACAM-3 and/or CEACAM-5), LAG3, VISTA, BTLA, TIGIT, LAIR1, CD160, 2B4 or TGF beta.

[0641] In one embodiment, when the CAR-expressing cell comprises two or more different CARs, the antigen binding domains of the different CARs can be such that the antigen binding domains do not interact with one another. For example, a cell expressing a first and second CAR can have an antigen binding domain of the first CAR, e.g., as a fragment, e.g., an scFv, that does not form an association with the antigen binding domain of the second CAR, e.g., the antigen binding domain of the second CAR is a VHH.

[0642] In some embodiments, the antigen binding domain comprises a single domain antigen binding (SDAB) molecules include molecules whose complementary determining regions are part of a single domain polypeptide. Examples include, but are not limited to, heavy chain variable domains, binding molecules naturally devoid of light chains, single domains derived from conventional 4-chain antibodies, engineered domains and single domain scaffolds other than those derived from antibodies. SDAB molecules may be any of the art, or any future single domain molecules. SDAB molecules may be derived from any species including, but not limited to mouse, human, camel, llama, lamprey, fish, shark, goat, rabbit, and bovine. This term also includes naturally occurring single domain antibody molecules from species other than Camelidae and sharks.

[0643] In one aspect, an SDAB molecule can be derived from a variable region of the immunoglobulin found in fish, such as, for example, that which is derived from the immunoglobulin isotype known as Novel Antigen Receptor (NAR) found in the serum of shark. Methods of producing single domain molecules derived from a variable region of NAR (“IgNARs”) are described in WO 03/014161 and Streltsov (2005) Protein Sci. 14:2901-2909.

[0644] According to another aspect, an SDAB molecule is a naturally occurring single domain antigen binding molecule known as heavy chain devoid of light chains. Such single domain molecules are disclosed in WO 9404678 and Hamers-Casterman, C. et al. (1993) Nature 363:446-448, for example. For clarity reasons, this variable domain derived from a heavy chain molecule naturally devoid of light chain is known herein as a VHH or nanobody to distinguish it from the conventional VH of four chain immunoglobulins. Such a VHH molecule can be derived from Camelidae species, for example in camel, llama, dromedary, alpaca and guanaco. Other species besides Camelidae may produce heavy chain molecules naturally devoid of light chain; such VHHs are within the scope of the invention.

[0645] The SDAB molecules can be recombinant, CDR-grafted, humanized, camelized, de-immunized and/or in vitro generated (e.g., selected by phage display).

[0646] It has also been discovered, that cells having a plurality of chimeric membrane embedded receptors comprising an antigen binding domain that interactions between the antigen binding domain of the receptors can be undesirable, e.g., because it inhibits the ability of one or more of the antigen binding domains to bind its cognate antigen. Accordingly, disclosed herein are cells having a first and a second non-naturally occurring chimeric membrane embedded receptor comprising antigen binding domains that minimize such interactions. Also disclosed herein are nucleic acids encoding a first and a second non-naturally occurring chimeric membrane embedded receptor comprising antigen binding domains that minimize such interactions, as well as methods of making and using such cells and nucleic acids. In an embodiment the antigen binding domain of one of said first said second non-naturally occurring chimeric membrane embedded receptor, comprises an scFv, and the other comprises a single VH domain, e.g., a camelid, shark, or lamprey single VH domain, or a single VH domain derived from a human or mouse sequence.

[0647] In some embodiments, the claimed invention comprises a first and second CAR, wherein the antigen binding domain of one of said first CAR said second CAR does not comprise a variable light domain and a variable heavy domain. In some embodiments, the antigen binding domain of one of said first CAR said second CAR is an scFv, and the other is not an scFv. In some embodiments, the antigen binding domain of one of said first CAR said second CAR comprises a single VH domain, e.g., a camelid, shark, or lamprey single VH domain, or a single VH domain derived from a human or mouse sequence. In some embodiments, the antigen binding domain of one of said first CAR said second CAR comprises a nanobody. In some embodiments, the antigen binding domain of one of said first CAR said second CAR comprises a camelid VHH domain.

[0648] In some embodiments, the antigen binding domain of one of said first CAR said second CAR comprises an scFv, and the other comprises a single VH domain, e.g., a camelid, shark, or lamprey single VH domain, or a single VH domain derived from a human or mouse sequence. In some embodiments, the antigen binding domain of one of said first CAR said second CAR comprises an scFv, and the other comprises a nanobody. In some embodiments, the antigen binding domain of one of said first CAR said second CAR comprises an scFv, and the other comprises a camelid VHH domain.

[0649] In some embodiments, when present on the surface of a cell, binding of the antigen binding domain of said first CAR to its cognate antigen is not substantially reduced by the presence of said second CAR. In some embodiments, binding of the antigen binding domain of said first CAR to its cognate antigen in the presence of said second CAR is 85%, 90%, 95%, 96%, 97%, 98% or 99% of binding of the antigen binding domain of said first CAR to its cognate antigen in the absence of said second CAR.

[0650] In some embodiments, when present on the surface of a cell, the antigen binding domains of said first CAR said second CAR, associate with one another less than if both were scFv antigen binding domains. In some embodiments, the antigen binding domains of said first CAR said second CAR, associate with one another 85%, 90%, 95%, 96%, 97%, 98% or 99% less than if both were scFv antigen binding domains.

[0651] In another aspect, the CAR-expressing cell described herein can further express another agent, e.g., an agent which enhances the activity of a CAR-expressing cell. For example, in one embodiment, the agent can be an agent which inhibits an inhibitory molecule. Inhibitory molecules, e.g., PD1, can, in some embodiments, decrease the ability of a CAR-expressing cell to mount an immune effector response. Examples of inhibitory molecules include PD1, PD-L1, CTLA4, TIM3, CEACAM (e.g., CEACAM-1, CEACAM-3 and/or CEACAM-5), LAG3, VISTA, BTLA, TIGIT, LAIR1, CD160, 2B4 and TGF beta. In one embodiment, the agent which inhibits an inhibitory molecule, e.g., is a molecule described herein, e.g., an agent that comprises a first polypeptide, e.g., an inhibitory molecule, associated with a second polypeptide that provides a positive signal to the cell, e.g., an intracellular signaling domain described herein. In one embodiment, the agent comprises a first polypeptide, e.g., of an inhibitory molecule such as PD1, PD-L1, CTLA4, TIM3, CEACAM (e.g., CEACAM-1, CEACAM-3 and/or CEACAM-5), LAG3, VISTA, BTLA, TIGIT, LAIR1, CD160, 2B4 or TGF beta, or a fragment of any of these (e.g., at least a portion of an extracellular domain of any of these), and a second polypeptide which is an intracellular signaling domain described herein (e.g., comprising a costimulatory domain (e.g., 41BB, CD27 or CD28, e.g., as described herein) and/or a primary signaling domain (e.g., a CD3 zeta signaling domain described herein). In one embodiment, the agent comprises a first polypeptide of PD1 or a fragment thereof (e.g., at least a portion of an extracellular domain of PD1), and a second polypeptide of an intracellular signaling domain described herein (e.g., a CD28 signaling domain described herein and/or a CD3 zeta signaling domain described herein). PD1 is an inhibitory member of the CD28 family of receptors that also includes CD28, CTLA-4, ICOS, and BTLA. PD-1 is expressed on activated B cells, T cells and myeloid cells (Agata et al. 1996 Int. Immunol 8:765-75). Two ligands for PD1, PD-L1 and PD-L2 have been shown to downregulate T cell activation upon binding to PD1 (Freeman et a. 2000 J Exp Med 192:1027-34; Latchman et al. 2001 Nat Immunol 2:261-8; Carter et al. 2002 Eur J Immunol 32:634-43). PD-L1 is abundant in human cancers (Dong et al. 2003 J Mol Med 81:281-7; Blank et al. 2005 Cancer Immunol. Immunother 54:307-314; Konishi et al. 2004 Clin Cancer Res 10:5094) Immune suppression can be reversed by inhibiting the local interaction of PD1 with PD-L1.

[0652] In one embodiment, the agent comprises the extracellular domain (ECD) of an inhibitory molecule, e.g., Programmed Death 1 (PD1), fused to a transmembrane domain and intracellular signaling domains such as 41BB and CD3 zeta (also referred to herein as a PD1 CAR). In one embodiment, the PD1 CAR, when used in combinations with a XCAR described herein, improves the persistence of the T cell. In one embodiment, the CAR is a PD1 CAR comprising the extracellular domain of PD1 indicated as underlined in SEQ ID NO: 26. In one embodiment, the PD1 CAR comprises the amino acid sequence of SEQ ID NO:26.

(SEQ ID NO: 26)

Malpvtalllplalllhaarppgwfldspdrpwnpptfspallvvtegd
natftcsfsntsesfvlnwyrmspsnqtdklaafpedrsqpgqdcrfrv
tqlpngrdfhmsvvrarrndsgtylcgaislapkaqikeslraelrvte
rraevptahpspsprpagqfqtlvtttpaprpptpaptiasqplslrpe
acrpaaggavhtrgldfacdiyiwaplagtcgvlllslvitlyckrgrk
llyifkqpfmrpvqttqeedgcscrfpeeeeggcelrvkfsrsadapay
kqgqnqlynelnlgrreeydvldkrrgrdpemggkprrknpqeglynel
qkdkmaeayseigmkgerrrgkghdglyqglstatkdtydalhmqa
lppr.

[0653] In one embodiment, the PD1 CAR comprises the amino acid sequence provided below (SEQ ID NO:39).

(SEQ ID NO: 39)

pgwfldspdrpwnpptfspallvvtegdnatftcsfsntsesfvlnwyrm
spsnqtdklaafpedrsqpgqdcrfrvtqlpngrdfhmsvvrarrndsgt
ylcgaislapkaqikeslraelrvterraevptahpspsprpagqfqtlv
tttpaprpptpaptiasqplslrpeacrpaaggavhtrgldfacdiyiwa
plagtcgvlllslvitlyckrgrkkllyifkqpfmrpvqttqeedgcscr
fpeeeeggcelrvkfsrsadapaykqgqnqlynelnlgrreeydvldkrr
grdpemggkprrknpqeglynelqkdkmaeayseigmkgerrrgkghdgl
yqglstatkdtydalhmqalppr.

[0654] In one embodiment, the agent comprises a nucleic acid sequence encoding the PD1 CAR, e.g., the PD1 CAR described herein. In one embodiment, the nucleic acid sequence for the PD1 CAR is shown below, with the PD1 ECD underlined below in SEQ ID NO: 27

(SEQ ID NO: 27)

atggccctccctgtcactgccctgcttctccccctcgcactcctgctcca
cgccgctagaccacccggatggtttctggactctccggatcgcccgtgga
atcccccaaccttctcaccggcactcttggttgtgactgagggcgataat
gcgaccttcacgtgctcgttctccaacacctccgaatcattcgtgctgaa
ctggtaccgcatgagcccgtcaaaccagaccgacaagctcgccgcgtttc
cggaagatcggtcgcaaccgggacaggattgtcggttccgcgtgactcaa
ctgccgaatggcagagacttccacatgagcgtggtccgcgctaggcgaaa
cgactccgggacctacctgtgcggagccatctcgctggcgcctaaggccc
aaatcaaagagagcttgagggccgaactgagagtgaccgagcgcagagct
gaggtgccaactgcacatccatccccatcgcctcggcctgcggggcagtt
tcagaccctggtcacgaccactccggcgccgcgcccaccgactccggccc
caactatcgcgagccagcccctgtcgctgaggccggaagcatgccgccct
gccgccggaggtgctgtgcatacccggggattggacttcgcatgcgacat
ctacatttgggctcctctcgccggaacttgtggcgtgctccttctgtccc
tggtcatcaccctgtactgcaagcggggtcggaaaaagcttctgtacatt
ttcaagcagcccttcatgaggcccgtgcaaaccacccaggaggaggacgg
ttgctcctgccggttccccgaagaggaagaaggaggttgcgagctgcgcg
tgaagttctcccggagcgccgacgcccccgcctataagcagggccagaac
cagctgtacaacgaactgaacctgggacggcgggaagagtacgatgtgct
ggacaagcggcgcggccgggaccccgaaatgggcgggaagcctagaagaa
agaaccctcaggaaggcctgtataacgagctgcagaaggacaagatggcc
gaggcctactccgaaattgggatgaagggagagcggcggaggggaaaggg
gcacgacggcctgtaccaaggactgtccaccgccaccaaggacacatacg
atgccctgcacatgcaggcccttccccctcgc.

[0655] In another aspect, the present invention provides a population of CAR-expressing cells, e.g., CART cells. In some embodiments, the population of CAR-expressing cells comprises a mixture of cells expressing different CARs. For example, in one embodiment, the population of CART cells can include a first cell expressing a CAR having an antigen binding domain to a cancer associated antigen described herein, and a second cell expressing a CAR having a different antigen binding domain, e.g., an antigen binding domain to a different a cancer associated antigen described herein, e.g., an antigen binding domain to a cancer associated antigen described herein that differs from the cancer associated antigen bound by the antigen binding domain of the CAR expressed by the first cell. As another example, the population of CAR-expressing cells can include a first cell expressing a CAR that includes an antigen binding domain to a cancer associated antigen described herein, and a second cell expressing a CAR that includes an antigen binding domain to a target other than a cancer associated antigen as described herein. In one embodiment, the population of CAR-expressing cells includes, e.g., a first cell expressing a CAR that includes a primary intracellular signaling domain, and a second cell expressing a CAR that includes a secondary signaling domain.

[0656] In another aspect, the present invention provides a population of cells wherein at least one cell in the population expresses a CAR having an antigen binding domain to a cancer associated antigen described herein, and a second cell expressing another agent, e.g., an agent which enhances the activity of a CAR-expressing cell. For example, in one embodiment, the agent can be an agent which inhibits an inhibitory molecule. Inhibitory molecules, e.g., PD-1, can, in some embodiments, decrease the ability of a CAR-expressing cell to mount an immune effector response. Examples of inhibitory molecules include PD-1, PD-L1, CTLA4, TIM3, CEACAM (e.g., CEACAM-1, CEACAM-3 and/or CEACAM-5), LAG3, VISTA, BTLA, TIGIT, LAIR1, CD160, 2B4 and TGF beta. In one embodiment, the agent which inhibits an inhibitory molecule, e.g., is a molecule described herein, e.g., an agent that comprises a first polypeptide, e.g., an inhibitory molecule, associated with a second polypeptide that provides a positive signal to the cell, e.g., an intracellular signaling domain described herein. In one embodiment, the agent comprises a first polypeptide, e.g., of an inhibitory molecule such as PD-1, PD-L1, CTLA4, TIM3, CEACAM (e.g., CEACAM-1, CEACAM-3 and/or CEACAM-5), LAG3, VISTA, BTLA, TIGIT, LAIR1, CD160, 2B4 or TGF beta, or a fragment of any of these, and a second polypeptide which is an intracellular signaling domain described herein (e.g., comprising a costimulatory domain (e.g., 41BB, CD27, OX40 or CD28, e.g., as described herein) and/or a primary signaling domain (e.g., a CD3 zeta signaling domain described herein). In one embodiment, the agent comprises a first polypeptide of PD-1 or a fragment thereof, and a second polypeptide of an intracellular signaling domain described herein (e.g., a CD28 signaling domain described herein and/or a CD3 zeta signaling domain described herein).

[0657] In one aspect, the present invention provides methods comprising administering a population of CAR-expressing cells, e.g., CART cells, e.g., a mixture of cells expressing different CARs, in combination with another agent, e.g., a kinase inhibitor, such as a kinase inhibitor described herein. In another aspect, the present invention provides methods comprising administering a population of cells wherein at least one cell in the population expresses a CAR having an antigen binding domain of a cancer associated antigen described herein, and a second cell expressing another agent, e.g., an agent which enhances the activity of a CAR-expressing cell, in combination with another agent, e.g., a kinase inhibitor, such as a kinase inhibitor described herein.

### Regulatable Chimeric Antigen Receptors

[0658] In some embodiments, a regulatable CAR (RCAR) where the CAR activity can be controlled is desirable to optimize the safety and efficacy of a CAR therapy. There are many ways CAR activities can be regulated. For example, inducible apoptosis using, e.g., a caspase fused to a dimerization domain (see, e.g., Di et al., N Egnl. J. Med. 2011 Nov. 3; 365(18):1673-1683), can be used as a safety switch in the CAR therapy of the instant invention. In an aspect, a RCAR comprises a set of polypeptides, typically two in the simplest embodiments, in which the components of a standard CAR described herein, e.g., an antigen binding domain and an intracellular signaling domain, are partitioned on separate polypeptides or members. In some embodiments, the set of polypeptides include a dimerization switch that, upon the presence of a dimerization molecule, can couple the polypeptides to one another, e.g., can couple an antigen binding domain to an intracellular signaling domain.

[0659] In an aspect, an RCAR comprises two polypeptides or members: 1) an intracellular signaling member comprising an intracellular signaling domain, e.g., a primary intracellular signaling domain described herein, and a first switch domain; 2) an antigen binding member comprising an antigen binding domain, e.g., that targets a tumor antigen described herein, as described herein and a second switch domain Optionally, the RCAR comprises a transmembrane domain described herein. In an embodiment, a transmembrane domain can be disposed on the intracellular signaling member, on the antigen binding member, or on both. (Unless otherwise indicated, when members or elements of an RCAR are described herein, the order can be as provided, but other orders are included as well. In other words, in an embodiment, the order is as set out in the text, but in other embodiments, the order can be different. E.g., the order of elements on one side of a transmembrane region can be different from the example, e.g., the placement of a switch domain relative to a intracellular signaling domain can be different, e.g., reversed).

[0660] In an embodiment, the first and second switch domains can form an intracellular or an extracellular dimerization switch. In an embodiment, the dimerization switch can be a homodimerization switch, e.g., where the first and second switch domain are the same, or a heterodimerization switch, e.g., where the first and second switch domain are different from one another.

[0661] In embodiments, an RCAR can comprise a “multi switch.” A multi switch can comprise heterodimerization switch domains or homodimerization switch domains. A multi switch comprises a plurality of, e.g., 2, 3, 4, 5, 6, 7, 8, 9, or 10, switch domains, independently, on a first member, e.g., an antigen binding member, and a second member, e.g., an intracellular signaling member. In an embodiment, the first member can comprise a plurality of first switch domains, e.g., FKBP-based switch domains, and the second member can comprise a plurality of second switch domains, e.g., FRB-based switch domains. In an embodiment, the first member can comprise a first and a second switch domain, e.g., a FKBP-based switch domain and a FRB-based switch domain, and the second member can comprise a first and a second switch domain, e.g., a FKBP-based switch domain and a FRB-based switch domain.

[0662] In an embodiment, the intracellular signaling member comprises one or more intracellular signaling domains, e.g., a primary intracellular signaling domain and one or more costimulatory signaling domains.

[0663] In an embodiment, the antigen binding member may comprise one or more intracellular signaling domains, e.g., one or more costimulatory signaling domains. In an embodiment, the antigen binding member comprises a plurality, e.g., 2 or 3 costimulatory signaling domains described herein, e.g., selected from 41BB, CD28, CD27, ICOS, and OX40, and in embodiments, no primary intracellular signaling domain. In an embodiment, the antigen binding member comprises the following costimulatory signaling domains, from the extracellular to intracellular direction: 41BB-CD27; 41BB-CD27; CD27-41BB; 41BB-CD28; CD28-41BB; OX40-CD28; CD28-OX40; CD28-41BB; or 41BB-CD28. In such embodiments, the intracellular binding member comprises a CD3zeta domain. In one such embodiment the RCAR comprises (1) an antigen binding member comprising, an antigen binding domain, a transmembrane domain, and two costimulatory domains and a first switch domain; and (2) an intracellular signaling domain comprising a transmembrane domain or membrane tethering domain and at least one primary intracellular signaling domain, and a second switch domain.

[0664] An embodiment provides RCARs wherein the antigen binding member is not tethered to the surface of the CAR cell. This allows a cell having an intracellular signaling member to be conveniently paired with one or more antigen binding domains, without transforming the cell with a sequence that encodes the antigen binding member. In such embodiments, the RCAR comprises: 1) an intracellular signaling member comprising: a first switch domain, a transmembrane domain, an intracellular signaling domain, e.g., a primary intracellular signaling domain, and a first switch domain; and 2) an antigen binding member comprising: an antigen binding domain, and a second switch domain, wherein the antigen binding member does not comprise a transmembrane domain or membrane tethering domain, and, optionally, does not comprise an intracellular signaling domain. In some embodiments, the RCAR may further comprise 3) a second antigen binding member comprising: a second antigen binding domain, e.g., a second antigen binding domain that binds a different antigen than is bound by the antigen binding domain; and a second switch domain.

[0665] Also provided herein are RCARs wherein the antigen binding member comprises bispecific activation and targeting capacity. In this embodiment, the antigen binding member can comprise a plurality, e.g., 2, 3, 4, or 5 antigen binding domains, e.g., scFvs, wherein each antigen binding domain binds to a target antigen, e.g. different antigens or the same antigen, e.g., the same or different epitopes on the same antigen. In an embodiment, the plurality of antigen binding domains are in tandem, and optionally, a linker or hinge region is disposed between each of the antigen binding domains. Suitable linkers and hinge regions are described herein.

[0666] An embodiment provides RCARs having a configuration that allows switching of proliferation. In this embodiment, the RCAR comprises: 1) an intracellular signaling member comprising: optionally, a transmembrane domain or membrane tethering domain; one or more co-stimulatory signaling domain, e.g., selected from 41BB, CD28, CD27, ICOS, and OX40, and a switch domain; and 2) an antigen binding member comprising: an antigen binding domain, a transmembrane domain, and a primary intracellular signaling domain, e.g., a CD3zeta domain, wherein the antigen binding member does not comprise a switch domain, or does not comprise a switch domain that dimerizes with a switch domain on the intracellular signaling member. In an embodiment, the antigen binding member does not comprise a co-stimulatory signaling domain. In an embodiment, the intracellular signaling member comprises a switch domain from a homodimerization switch. In an embodiment, the intracellular signaling member comprises a first switch domain of a heterodimerization switch and the RCAR comprises a second intracellular signaling member which comprises a second switch domain of the heterodimerization switch. In such embodiments, the second intracellular signaling member comprises the same intracellular signaling domains as the intracellular signaling member. In an embodiment, the dimerization switch is intracellular. In an embodiment, the dimerization switch is extracellular.

[0667] In any of the RCAR configurations described here, the first and second switch domains comprise a FKBP-FRB based switch as described herein.

[0668] Also provided herein are cells comprising an RCAR described herein. Any cell that is engineered to express a RCAR can be used as a RCARX cell. In an embodiment the RCARX cell is a T cell, and is referred to as a RCART cell. In an embodiment the RCARX cell is an NK cell, and is referred to as a RCARN cell.

[0669] Also provided herein are nucleic acids and vectors comprising RCAR encoding sequences. Sequence encoding various elements of an RCAR can be disposed on the same nucleic acid molecule, e.g., the same plasmid or vector, e.g., viral vector, e.g., lentiviral vector. In an embodiment, (i) sequence encoding an antigen binding member and (ii) sequence encoding an intracellular signaling member, can be present on the same nucleic acid, e.g., vector. Production of the corresponding proteins can be achieved, e.g., by the use of separate promoters, or by the use of a bicistronic transcription product (which can result in the production of two proteins by cleavage of a single translation product or by the translation of two separate protein products). In an embodiment, a sequence encoding a cleavable peptide, e.g., a P2A or F2A sequence, is disposed between (i) and (ii). In an embodiment, a sequence encoding an IRES, e.g., an EMCV or EV71 IRES, is disposed between (i) and (ii). In these embodiments, (i) and (ii) are transcribed as a single RNA. In an embodiment, a first promoter is operably linked to (i) and a second promoter is operably linked to (ii), such that (i) and (ii) are transcribed as separate mRNAs.

[0670] Alternatively, the sequence encoding various elements of an RCAR can be disposed on the different nucleic acid molecules, e.g., different plasmids or vectors, e.g., viral vector, e.g., lentiviral vector. E.g., the (i) sequence encoding an antigen binding member can be present on a first nucleic acid, e.g., a first vector, and the (ii) sequence encoding an intracellular signaling member can be present on the second nucleic acid, e.g., the second vector.

### Dimerization Switches

[0671] Dimerization switches can be non-covalent or covalent. In a non-covalent dimerization switch, the dimerization molecule promotes a non-covalent interaction between the switch domains. In a covalent dimerization switch, the dimerization molecule promotes a covalent interaction between the switch domains.

[0672] In an embodiment, the RCAR comprises a FKBP/FRAP, or FKBP/FRB,-based dimerization switch. FKBP12 (FKBP, or FK506 binding protein) is an abundant cytoplasmic protein that serves as the initial intracellular target for the natural product immunosuppressive drug, rapamycin. Rapamycin binds to FKBP and to the large PI3K homolog FRAP (RAFT, mTOR). FRB is a 93 amino acid portion of FRAP, that is sufficient for binding the FKBP-rapamycin complex (Chen, J., Zheng, X. F., Brown, E. J. & Schreiber, S. L. (1995) Identification of an 11-kDa FKBP12-rapamycin-binding domain within the 289-kDa FKBP12-rapamycin-associated protein and characterization of a critical serine residue. Proc Natl Acad Sci USA 92: 4947-51.)

[0673] In embodiments, an FKBP/FRAP, e.g., an FKBP/FRB, based switch can use a dimerization molecule, e.g., rapamycin or a rapamycin analog.

[0674] The amino acid sequence of FKBP is as follows:

(SEQ ID NO: 52)

D V P D Y A S L G G P S S P K K K R K V S R G V
Q V E T I S P G D G R T F P K R G Q T C V V H Y T
G M L E D G K K F D S S R D R N K P F K F M L G K
Q E V I R G W E E G V A Q M S V G Q R A K L T I S
P D Y A Y G A T G H P G I I P P H A T L V F D V E
L L K L E T S Y

[0675] In embodiments, an FKBP switch domain can comprise a fragment of FKBP having the ability to bind with FRB, or a fragment or analog thereof, in the presence of rapamycin or a rapalog, e.g., the underlined portion of SEQ ID NO: 52, which is:

(SEQ ID NO: 53)

V Q V E T I S P G D G R T F P K R G Q T C V V H Y
T G M L E D G K K F D S S R D R N K P F K F M L
G K Q E V I R G W E E G V A Q M S V G Q R A K L
T I S P D Y A Y G A T G H P G I I P P H A T L V F
D V E L L K L E T S

[0676] The amino acid sequence of FRB is as follows:

(SEQ ID NO: 54)

[sequence omitted]

[0677] “FKBP/FRAP, e.g., an FKBP/FRB, based switch” as that term is used herein, refers to a dimerization switch comprising: a first switch domain, which comprises an FKBP fragment or analog thereof having the ability to bind with FRB, or a fragment or analog thereof, in the presence of rapamycin or a rapalog, e.g., RAD001, and has at least 70, 75, 80, 85, 90, 95, 96, 97, 98, or 99% identity with, or differs by no more than 30, 25, 20, 15, 10, 5, 4, 3, 2, or 1 amino acid residues from, the FKBP sequence of SEQ ID NO: 52 or 53; and a second switch domain, which comprises an FRB fragment or analog thereof having the ability to bind with FRB, or a fragment or analog thereof, in the presence of rapamycin or a rapalog, and has at least 70, 75, 80, 85, 90, 95, 96, 97, 98, or 99% identity with, or differs by no more than 30, 25, 20, 15, 10, 5, 4, 3, 2, or 1 amino acid residues from, the FRB sequence of SEQ ID NO: 54. In an embodiment, a RCAR described herein comprises one switch domain comprises amino acid residues disclosed in SEQ ID NO: 52 (or SEQ ID NO: 53), and one switch domain comprises amino acid residues disclosed in SEQ ID NO: 54.

[0678] In embodiments, the FKBP/FRB dimerization switch comprises a modified FRB switch domain that exhibits altered, e.g., enhanced, complex formation between an FRB-based switch domain, e.g., the modified FRB switch domain, a FKBP-based switch domain, and the dimerization molecule, e.g., rapamycin or a rapalogue, e.g., RAD001. In an embodiment, the modified FRB switch domain comprises one or more mutations, e.g., 2, 3, 4, 5, 6, 7, 8, 9, 10 or more, selected from mutations at amino acid position(s) L2031, E2032, S2035, R2036, F2039, G2040, T2098, W2101, D2102, Y2105, and F2108, where the wild-type amino acid is mutated to any other naturally-occurring amino acid. In an embodiment, a mutant FRB comprises a mutation at E2032, where E2032 is mutated to phenylalanine (E2032F), methionine (E2032M), arginine (E2032R), valine (E2032V), tyrosine (E2032Y), isoleucine (E20321), e.g., SEQ ID NO: 55, or leucine (E2032L), e.g., SEQ ID NO: 56. In an embodiment, a mutant FRB comprises a mutation at T2098, where T2098 is mutated to phenylalanine (T2098F) or leucine (T2098L), e.g., SEQ ID NO: 57. In an embodiment, a mutant FRB comprises a mutation at E2032 and at T2098, where E2032 is mutated to any amino acid, and where T2098 is mutated to any amino acid, e.g., SEQ ID NO: 58. In an embodiment, a mutant FRB comprises an E20321 and a T2098L mutation, e.g., SEQ ID NO: 59. In an embodiment, a mutant FRB comprises an E2032L and a T2098L mutation, e.g., SEQ ID NO: 60.

TABLE 4
Exemplary mutant FRB having increased affinity for a
dimerization molecule.

| | | SEQ |
|---|---|---|
| | | ID |
| FRB mutant | Amino Acid Sequence | NO: |
| E2032I mutant | ILWHEMWHEGLIEASRLYFGERNVKGMFEVLEPLHAMMERGPQTLKETSFN | 55 |
| | QAYGRDLMEAQEWCRKYMKSGNVKDLTQAWDLYYHVFRRISKTS | |
| E2032L mutant | ILWHEMWHEGLLEASRLYFGERNVKGMFEVLEPLHAMMERGPQTLKETSFN | 56 |
| | QAYGRDLMEAQEWCRKYMKSGNVKDLTQAWDLYYHVFRRISKTS | |
| T2098L mutant | ILWHEMWHEGLEEASRLYFGERNVKGMFEVLEPLHAMMERGPQTLKETSFN | 57 |
| | QAYGRDLMEAQEWCRKYMKSGNVKDLLQAWDLYYHVFRRISKTS | |
| E2032, T2098 | ILWHEMWHEGLXEASRLYFGERNVKGMFEVLEPLHAMMERGPQTLKETSFN | 58 |
| mutant | QAYGRDLMEAQEWCRKYMKSGNVKDLXQAWDLYYHVFRRISKTS | |
| E2032I, T2098L | ILWHEMWHEGLIEASRLYFGERNVKGMFEVLEPLHAMMERGPQTLKETSFN | 59 |
| mutant | QAYGRDLMEAQEWCRKYMKSGNVKDLLQAWDLYYHVFRRISKTS | |
| E2032L, T2098L | ILWHEMWHEGLLEASRLYFGERNVKGMFEVLEPLHAMMERGPQTLKETSFN | 60 |
| mutant | QAYGRDLMEAQEWCRKYMKSGNVKDLLQAWDLYYHVFRRISKTS | |

[0679] Other suitable dimerization switches include a GyrB-GyrB based dimerization switch, a Gibberellin-based dimerization switch, a tag/binder dimerization switch, and a halo-tag/snap-tag dimerization switch. Following the guidance provided herein, such switches and relevant dimerization molecules will be apparent to one of ordinary skill.

### Dimerization Molecule

[0680] Association between the switch domains is promoted by the dimerization molecule. In the presence of dimerization molecule interaction or association between switch domains allows for signal transduction between a polypeptide associated with, e.g., fused to, a first switch domain, and a polypeptide associated with, e.g., fused to, a second switch domain. In the presence of non-limiting levels of dimerization molecule signal transduction is increased by 1.1, 1.2, 1.3, 1.4, 1.5, 1.6, 1.7, 1.8, 1.9, 2, 5, 10, 50, 100 fold, e.g., as measured in a system described herein.

[0681] Rapamycin and rapamycin analogs (sometimes referred to as rapalogues), e.g., RAD001, can be used as dimerization molecules in a FKBP/FRB-based dimerization switch described herein. In an embodiment the dimerization molecule can be selected from rapamycin (sirolimus), RAD001 (everolimus), zotarolimus, temsirolimus, AP-23573 (ridaforolimus), biolimus and AP21967. Additional rapamycin analogs suitable for use with FKBP/FRB-based dimerization switches are further described in the section entitled

[0682] “Combination Therapies”, or in the subsection entitled “Exemplary mTOR inhibitors”.

### Split CAR

[0683] In some embodiments, the CAR-expressing cell uses a split CAR. The split CAR approach is described in more detail in publications WO2014/055442 and WO2014/055657. Briefly, a split CAR system comprises a cell expressing a first CAR having a first antigen binding domain and a costimulatory domain (e.g., 41BB), and the cell also expresses a second CAR having a second antigen binding domain and an intracellular signaling domain (e.g., CD3 zeta). When the cell encounters the first antigen, the costimulatory domain is activated, and the cell proliferates. When the cell encounters the second antigen, the intracellular signaling domain is activated and cell-killing activity begins. Thus, the CAR-expressing cell is only fully activated in the presence of both antigens.

### Exemplary CAR Molecules

[0684] The CAR molecules disclosed herein can comprise a binding domain that binds to a target, e.g., a target as described herein; a transmembrane domain, e.g., a transmembrane domain as described herein; and an intracellular signaling domain, e.g., an intracellular domain as described herein. In embodiments, the binding domain comprises a heavy chain complementary determining region 1 (HC CDR1), a heavy chain complementary determining region 2 (HC CDR2), and a heavy chain complementary determining region 3 (HC CDR3) of a heavy chain binding domain described herein, and/or a light chain complementary determining region 1 (LC CDR1), a light chain complementary determining region 2 (LC CDR2), and a light chain complementary determining region 3 (LC CDR3) of a light chain binding domain described herein.

[0685] In other embodiments, the CAR molecule comprises a CD19 CAR molecule described herein, e.g., a CD19 CAR molecule described in US-2015-0283178-A1, e.g., CTL019. In embodiments, the CD19 CAR comprises an amino acid, or has a nucleotide sequence shown in US-2015-0283178-A1, incorporated herein by reference, or a sequence substantially identical thereto (e.g., at least 85%, 90%, 95% or more identical thereto).

[0686] In one embodiment, the CAR T cell that specifically binds to CD19 has the USAN designation TISAGENLECLEUCEL-T. CTL019 is made by a gene modification of T cells is mediated by stable insertion via transduction with a self-inactivating, replication deficient Lentiviral (LV) vector containing the CTL019 transgene under the control of the EF-1 alpha promoter. CTL019 can be a mixture of transgene positive and negative T cells that are delivered to the subject on the basis of percent transgene positive T cells.

[0687] In other embodiments, the CD19 CAR includes a CAR molecule, or an antigen binding domain (e.g., a humanized antigen binding domain) according to Table 3 of WO2014/153270, incorporated herein by reference. The amino acid and nucleotide sequences encoding the CD19 CAR molecules and antigen binding domains (e.g., including one, two, three VH CDRs; and one, two, three VL CDRs according to Kabat or Chothia), are specified in WO2014/153270. In embodiments, the CD19 CAR comprises an amino acid, or has a nucleotide sequence shown in WO2014/153270 incorporated herein by reference, or a sequence substantially identical to any of the aforesaid sequences (e.g., at least 85%, 90%, 95% or more identical to any of the aforesaid CD19 CAR sequences).

[0688] In one embodiment, the parental murine scFv sequence is the CAR19 construct provided in PCT publication WO2012/079000 (incorporated herein by reference) and provided herein in Table 5. In one embodiment, the anti-CD19 binding domain is a scFv described in WO2012/079000 and provided herein in Table 5.

[0689] In one embodiment, the CD19 CAR comprises an amino acid sequence provided as SEQ ID NO: 12 in PCT publication WO2012/079000. In embodiment, the amino acid sequence is:

[0690] MALPVTALLLPLALLLHAARPdiqmtqttsslsaslgdrvtiscrasqdiskylnwyqqkpdgtvklli yhtsrlhsgvpsrfsgsgsgtdysltisnleqediatyfcqqgntlpytfgggtkleitggggsggggsggggsevklqesgpglva psqslsvtctvsgvslpdygvswirqpprkglewlgviwgsettyynsalksrltiikdnsksqvflkmnslqtddtaiyycakh yyyggsyamdywgqgtsvtvsstttpaprpptpaptiasqplslrpeacrpaaggavhtrgldfacdiyiwaplagtcgvlllslv itlyckrgrkkllyifkqpfmrpvqttqeedgcscrfpeeeeggcelrvkfsrsadapaykqgqnqlynelnlgrreeydvldkrr grdpemggkprrknpqeglynelqkdkmaeayseigmkgerrrgkghdglyqglstatkdtydalhmqalppr (SEQ ID NO: 891), or a sequence substantially identical thereto (e.g., at least 85%, 90% or 95% or higher identical thereto), with or without the signal peptide sequence indicated in capital letters.

[0691] In embodiment, the amino acid sequence is:

[0692] diqmtqttsslsaslgdrvtiscrasqdiskylnwyqqkpdgtvklliyhtsrlhsgvpsrfsgsgsgtdysltisnleqe diatyfcqqgntlpytfgggtkleitggggsggggsggggsevklqesgpglvapsqslsvtctvsgvslpdygvswirqpprkg lewlgviwgsettyynsalksrltiikdnsksqvflkmnslqtddtaiyycakhyyyggsyamdywgqgtsvtvsstttpaprp ptpaptiasqplslrpeacrpaaggavhtrgldfacdiyiwaplagtcgvlllslvitlyckrgrkkllyifkqpfmrpvqttqeedg cscrfpeeeeggcelrvkfsrsadapaykqgqnqlynelnlgrreeydvldlargrdpemggkprrknpqeglynelqkdkm aeayseigmkgerrrgkghdglyqglstatkdtydalhmqalppr (SEQ ID NO: 892), or a sequence substantially homologous thereto (e.g., at least 85%, 90% or 95% or higher identical thereto).

[0693] In embodiments, the CAR molecule is a CD19 CAR molecule described herein, e.g., a humanized CAR molecule described herein, e.g., a humanized CD19 CAR molecule of Table 5 or having CDRs as set out in Tables 6A and 6B.

[0694] In embodiments, the CAR molecule is a CD19 CAR molecule described herein, e.g., a murine CAR molecule described herein, e.g., a murine CD19 CAR molecule of Table 5 or having CDRs as set out in Tables 6A and 6B.

[0695] In some embodiments, the CAR molecule comprises one, two, and/or three CDRs from the heavy chain variable region and/or one, two, and/or three CDRs from the light chain variable region of the murine or humanized CD19 CAR of Tables 6A and 6B.

[0696] In one embodiment, the antigen binding domain comprises one, two three (e.g., all three) heavy chain CDRs, HC CDR1, HC CDR2 and HC CDR3, from an antibody listed herein, and/or one, two, three (e.g., all three) light chain CDRs, LC CDR1, LC CDR2 and LC CDR3, from an antibody listed herein. In one embodiment, the antigen binding domain comprises a heavy chain variable region and/or a variable light chain region of an antibody listed or described herein.

[0697] Exemplary CD19 CARs include any of the CD19 CARs or anti-CD19 binding domains described herein, e.g., in one or more tables (e.g., Table 5) described herein (e.g., or an anti-CD19 CAR described in Xu et al. Blood 123.24(2014):3750-9; Kochenderfer et al. Blood 122.25(2013):4129-39, Cruz et al. Blood 122.17(2013):2965-73, NCT00586391, NCT01087294, NCT02456350, NCT00840853, NCT02659943, NCT02650999, NCT02640209, NCT01747486, NCT02546739, NCT02656147, NCT02772198, NCT00709033, NCT02081937, NCT00924326, NCT02735083, NCT02794246, NCT02746952, NCT01593696, NCT02134262, NCT01853631, NCT02443831, NCT02277522, NCT02348216, NCT02614066, NCT02030834, NCT02624258, NCT02625480, NCT02030847, NCT02644655, NCT02349698, NCT02813837, NCT02050347, NCT01683279, NCT02529813, NCT02537977, NCT02799550, NCT02672501, NCT02819583, NCT02028455, NCT01840566, NCT01318317, NCT01864889, NCT02706405, NCT01475058, NCT01430390, NCT02146924, NCT02051257, NCT02431988, NCT01815749, NCT02153580, NCT01865617, NCT02208362, NCT02685670, NCT02535364, NCT02631044, NCT02728882, NCT02735291, NCT01860937, NCT02822326, NCT02737085, NCT02465983, NCT02132624, NCT02782351, NCT01493453, NCT02652910, NCT02247609, NCT01029366, NCT01626495, NCT02721407, NCT01044069, NCT00422383, NCT01680991, NCT02794961, or NCT02456207, each of which is incorporated herein by reference in its entirety.

[0698] Exemplary CD19 CAR and antigen binding domain constructs that can be used in the methods described herein are shown in Table 5. The light and heavy chain CDR sequences according to Kabat are shown by the bold and underlined text, and are also summarized in Tables 5 and 6A-6B below. The location of the signal sequence and histidine tag are also underlined. In embodiments, the CD19 CAR sequences and antigen binding fragments thereof do not include the signal sequence and/or histidine tag sequences.

[0699] In embodiments, the CD19 CAR comprises an anti-CD19 binding domain (e.g., murine or humanized anti-CD19 binding domain), a transmembrane domain, and an intracellular signaling domain, and wherein said anti-CD19 binding domain comprises a heavy chain complementary determining region 1 (HC CDR1), a heavy chain complementary determining region 2 (HC CDR2), and a heavy chain complementary determining region 3 (HC CDR3) of any anti-CD19 heavy chain binding domain amino acid sequences listed in Table 5 and 6A-6B, or a sequence at least 85%, 90%, 95% or more identical thereto (e.g., having less than 5, 4, 3, 2 or 1 amino acid substitutions, e.g., conservative substitutions).

[0700] In one embodiment, the anti-CD19 binding domain comprises a light chain variable region described herein (e.g., in Table 5) and/or a heavy chain variable region described herein (e.g., in Table 5), or a sequence at least 85%, 90%, 95% or more identical thereto.

[0701] In one embodiment, the encoded anti-CD19 binding domain is a scFv comprising a light chain and a heavy chain of an amino acid sequence of Tables 5, or a sequence at least 85%, 90%, 95% or more identical thereto.

[0702] In an embodiment, the human or humanized anti-CD19 binding domain (e.g., an scFv) comprises: a light chain variable region comprising an amino acid sequence having at least one, two or three modifications (e.g., substitutions, e.g., conservative substitutions) but not more than 30, 20 or 10 modifications (e.g., substitutions, e.g., conservative substitutions) of an amino acid sequence of a light chain variable region provided in Table 5, or a sequence at least 85%, 90%, 95% or more identical thereto; and/or a heavy chain variable region comprising an amino acid sequence having at least one, two or three modifications (e.g., substitutions, e.g., conservative substitutions) but not more than 30, 20 or 10 modifications (e.g., substitutions, e.g., conservative substitutions) of an amino acid sequence of a heavy chain variable region provided in Table 5, or a sequence at least 85%, 90%, 95% or more identical thereto.

TABLE 5
CD19 CAR Constructs

| | | |
|---|---|---|
| | SEQ ID | |
| Name | NO: | Sequence |

CAR 1

| | | |
|---|---|---|
| CAR1 scFv | 893 | EIVMTQSPATLSLSPGERATLSCRASQDISKYLNWYQQKPGQAPRLLIYH |
| domain | | TSRLHSGIPARFSGSGSGTDYTLTISSLQPEDFAVYFCQQGNTLPYTFGQ |
| | | GTKLEIKGGGGSGGGGSGGGGSQVQLQESGPGLVKPSETLSLTCTVSGVS |
| | | LPDYGVSWIRQPPGKGLEWIGVIWGSETTYYSSSLKSRVTISKDNSKNQV |
| | | SLKLSSVTAADTAVYYCAKHYYYGGSYAMDYWGQGTLVTVSS |
| 103101 | 894 | atggccctccctgtcaccgccctgctgcttccgctggctcttctgctccacgccg |
| CAR1 | | ctcggcccgaaattgtgatgacccagtcacccgccactcttagcctttcacccgg |
| Soluble | | tgagcgcgcaaccctgtcttgcagagcctcccaagacatctcaaaataccttaat |
| scFv-nt | | tggtatcaacagaagcccggacaggctcctcgccttctgatctaccacaccagcc |
| | | ggctccattctggaatccctgccaggttcagcggtagcggatctgggaccgacta |
| | | caccctcactatcagctcactgcagccagaggacttcgctgtctatttctgtcag |
| | | caagggaacaccctgccctacacctttggacagggcaccaagctcgagattaaag |
| | | gtggaggtggcagcggaggaggtgggtccggcggtggaggaagccaggtccaact |
| | | ccaagaaagcggaccgggtcttgtgaagccatcagaaactctttcactgacttgt |
| | | actgtgagcggagtgtctctccccgattacggggtgtcttggatcagacagccac |
| | | cggggaagggtctggaatggattggagtgatttggggctctgagactacttacta |
| | | ctcttcatccctcaagtcacgcgtcaccatctcaaaggacaactctaagaatcag |
| | | gtgtcactgaaactgtcatctgtgaccgcagccgacaccgccgtgtactattgcg |
| | | ctaagcattactattatggcgggagctacgcaatggattactggggacagggtac |
| | | tctggtcaccgtgtccagccaccaccatcatcaccatcaccat |
| 103101 | 895 | MALPVTALLLPLALLLHAARPeivmtqspatlslspgeratlscrasqdiskyln |
| CAR1 | | wyqqkpgqaprlliyhtsrlhsgiparfsgsgsgtdytltisslqpedfavyfcq |
| Soluble | | qgntlpytfgqgtkleikggggsggggsggggsqvqlqesgpglvkpsetlsltc |
| scFv-aa | | tvsgvslpdygvswirqppgkglewigviwgsettyyssslksrvtiskdnsknq |
| | | vslklssvtaadtavyycakhyyyggsyamdywgqqtlvtvsshhhhhhhh |
| 104875 | 896 | atggccctccctgtcaccgccctgctgcttccgctggctcttctgctccacgccg |
| CAR 1- | | ctcggcccgaaattgtgatgacccagtcacccgccactcttagcctttcacccgg |
| Full-nt | | tgagcgcgcaaccctgtcttgcagagcctcccaagacatctcaaaataccttaat |
| | | tggtatcaacagaagcccggacaggctcctcgccttctgatctaccacaccagcc |
| | | ggctccattctggaatccctgccaggttcagcggtagcggatctgggaccgacta |
| | | caccctcactatcagctcactgcagccagaggacttcgctgtctatttctgtcag |
| | | caagggaacaccctgccctacacctttggacagggcaccaagctcgagattaaag |
| | | gtggaggtggcagcggaggaggtgggtccggcggtggaggaagccaggtccaact |
| | | ccaagaaagcggaccgggtcttgtgaagccatcagaaactctttcactgacttgt |
| | | actgtgagcggagtgtctctccccgattacggggtgtcttggatcagacagccac |
| | | cggggaagggtctggaatggattggagtgatttggggctctgagactacttacta |
| | | ctcttcatccctcaagtcacgcgtcaccatctcaaaggacaactctaagaatcag |
| | | gtgtcactgaaactgtcatctgtgaccgcagccgacaccgccgtgtactattgcg |
| | | ctaagcattactattatggcgggagctacgcaatggattactggggacagggtac |
| | | tctggtcaccgtgtccagcaccactaccccagcaccgaggccacccaccccggct |
| | | cctaccatcgcctcccagcctctgtccctgcgtccggaggcatgtagacccgcag |
| | | ctggtggggccgtgcatacccggggtcttgacttcgcctgcgatatctacatttg |
| | | ggcccctctggctggtacttgcggggtcctgctgctttcactcgtgatcactctt |
| | | tactgtaagcgcggtcggaagaagctgctgtacatctttaagcaacccttcatga |
| | | ggcctgtgcagactactcaagaggaggacggctgttcatgccggttcccagagga |
| | | ggaggaaggcggctgcgaactgcgcgtgaaattcagccgcagcgcagatgctcca |
| | | gcctacaagcaggggcagaaccagctctacaacgaactcaatcttggtcggagag |
| | | aggagtacgacgtgctggacaagcggagaggacgggacccagaaatgggcgggaa |
| | | gccgcgcagaaagaatccccaagagggcctgtacaacgagctccaaaaggataag |
| | | atggcagaagcctatagcgagattggtatgaaaggggaacgcagaagaggcaaag |
| | | gccacgacggactgtaccagggactcagcaccgccaccaaggacacctatgacgc |
| | | tcttcacatgcaggccctgccgcctcgg |
| 104875 | 897 | MALPVTALLLPLALLLHAARPeivmtqspatlslspgeratlscrasqdiskyln |
| CAR 1- | | wyqqkpgqaprlliyhtsrlhsgiparfsgsgsgtdytltisslqpedfavyfcq |
| Full-aa | | qgntlpytfgqqtkleikggggsggggsggggsqvqlqesqpglvkpsetlsltc |
| | | tvsqvslpdygvswirqppqkglewigviwgsettyyssslksrvtiskdnsknq |
| | | vslklssvtaadtavyycakhyyyggsyamdywgqgtlvtvsstttpaprpptpa |
| | | ptiasqplslrpeacrpaaggavhtrgldfacdiyiwaplagtcgvlllslvitl |
| | | yckrgrkkllyifkqpfmrpvqttqeedgcscrfpeeeeggcelrvkfsrsadap |
| | | aykqgqnqlynelnlgrreeydvldkrrgrdpemggkprrknpqeglynelqkdk |
| | | [sequence omitted] |

CAR 2

| | | |
|---|---|---|
| CAR2 scFv | 898 | eivmtqspatlslspgeratlscrasqdiskylnwyqqkpgqaprlliyhtsrlh |
| domain | | sgiparfsgsgsgtdytltisslqpedfavyfcqqgntlpytfgqgtkleikggg |
| | | gsggggsggggsqvqlqesgpglvkpsetlsltctvsgvslpdygvswirqppgk |
| | | glewigviwgsettyyqsslksrvtiskdnsknqvslklssvtaadtavyycakh |
| | | yyyggsyamdywgqgtlvtvss |
| 103102 | 899 | atggccctccctgtcaccgccctgctgcttccgctggctcttctgctccacgccg |
| CAR2- | | ctcggcccgaaattgtgatgacccagtcacccgccactcttagcctttcacccgg |
| Soluble | | tgagcgcgcaaccctgtcttgcagagcctcccaagacatctcaaaataccttaat |
| scFv-nt | | tggtatcaacagaagcccggacaggctcctcgccttctgatctaccacaccagcc |
| | | ggctccattctggaatccctgccaggttcagcggtagcggatctgggaccgacta |
| | | caccctcactatcagctcactgcagccagaggacttcgctgtctatttctgtcag |
| | | caagggaacaccctgccctacacctttggacagggcaccaagctcgagattaaag |
| | | gtggaggtggcagcggaggaggtgggtccggcggtggaggaagccaggtccaact |
| | | ccaagaaagcggaccgggtcttgtgaagccatcagaaactctttcactgacttgt |
| | | actgtgagcggagtgtctctccccgattacggggtgtcttggatcagacagccac |
| | | cggggaagggtctggaatggattggagtgatttggggctctgagactacttacta |
| | | ccaatcatccctcaagtcacgcgtcaccatctcaaaggacaactctaagaatcag |
| | | gtgtcactgaaactgtcatctgtgaccgcagccgacaccgccgtgtactattgcg |
| | | ctaagcattactattatggcgggagctacgcaatggattactggggacagggtac |
| | | tctggtcaccgtgtccagccaccaccatcatcaccatcaccat |
| 103102 | 900 | MALPVTALLLPLALLLHAARPeivmtqspatlslspgeratlscrasqdiskyln |
| CAR2- | | wyqqkpgqaprlliyhtsrlhsgiparfsgsgsgtdytltisslqpedfavyfcq |
| Soluble | | qgntlpytfgqgtkleikggggsggggsggggsqvqlqesgpglvkpsetlsltc |
| scFv-aa | | tvsgvslpdygvswirqppgkglewigviwgsettyyqsslksrvtiskdnsknq |
| | | vslklssvtaadtavyycakhyyyggsyamdywgqqtlvtvsshhhhhhhh |
| 104876 | 901 | atggccctccctgtcaccgccctgctgcttccgctggctcttctgctccacgccg |
| CAR 2- | | ctcggcccgaaattgtgatgacccagtcacccgccactcttagcctttcacccgg |
| Full-nt | | tgagcgcgcaaccctgtcttgcagagcctcccaagacatctcaaaataccttaat |
| | | tggtatcaacagaagcccggacaggctcctcgccttctgatctaccacaccagcc |
| | | ggctccattctggaatccctgccaggttcagcggtagcggatctgggaccgacta |
| | | caccctcactatcagctcactgcagccagaggacttcgctgtctatttctgtcag |
| | | caagggaacaccctgccctacacctttggacagggcaccaagctcgagattaaag |
| | | gtggaggtggcagcggaggaggtgggtccggcggtggaggaagccaggtccaact |
| | | ccaagaaagcggaccgggtcttgtgaagccatcagaaactctttcactgacttgt |
| | | actgtgagcggagtgtctctccccgattacggggtgtcttggatcagacagccac |
| | | cggggaagggtctggaatggattggagtgatttggggctctgagactacttacta |
| | | ccaatcatccctcaagtcacgcgtcaccatctcaaaggacaactctaagaatcag |
| | | gtgtcactgaaactgtcatctgtgaccgcagccgacaccgccgtgtactattgcg |
| | | ctaagcattactattatggcgggagctacgcaatggattactggggacagggtac |
| | | tctggtcaccgtgtccagcaccactaccccagcaccgaggccacccaccccggct |
| | | cctaccatcgcctcccagcctctgtccctgcgtccggaggcatgtagacccgcag |
| | | ctggtggggccgtgcatacccggggtcttgacttcgcctgcgatatctacatttg |
| | | ggcccctctggctggtacttgcggggtcctgctgctttcactcgtgatcactctt |
| | | tactgtaagcgcggtcggaagaagctgctgtacatctttaagcaacccttcatga |
| | | ggcctgtgcagactactcaagaggaggacggctgttcatgccggttcccagagga |
| | | ggaggaaggcggctgcgaactgcgcgtgaaattcagccgcagcgcagatgctcca |
| | | gcctacaagcaggggcagaaccagctctacaacgaactcaatcttggtcggagag |
| | | aggagtacgacgtgctggacaagcggagaggacgggacccagaaatgggcgggaa |
| | | gccgcgcagaaagaatccccaagagggcctgtacaacgagctccaaaaggataag |
| | | atggcagaagcctatagcgagattggtatgaaaggggaacgcagaagaggcaaag |
| | | gccacgacggactgtaccagggactcagcaccgccaccaaggacacctatgacgc |
| | | tcttcacatgcaggccctgccgcctcgg |
| 104876 | 902 | MALPVTALLLPLALLLHAARPeivmtqspatlslspgeratlscrasqdiskyln |
| CAR 2- | | wyqqkpgqaprlliyhtsrlhsgiparfsgsgsgtdytltisslqpedfavyfcq |
| Full-aa | | qgntlpytfgqqtkleikggggsggggsggggsqvqlqesqpglvkpsetlsltc |
| | | tvsqvslpdygvswirqppqkglewigviwgsettyyqsslksrvtiskdnsknq |
| | | vslklssvtaadtavyycakhyyyggsyamdywgqqtlvtvsstttpaprpptpa |
| | | ptiasqplslrpeacrpaaggavhtrgldfacdiyiwaplagtcgvlllslvitl |
| | | yckrgrkkllyifkqpfmrpvqttqeedgcscrfpeeeeggcelrvkfsrsadap |
| | | aykqgqnqlynelnlgrreeydvldkrrgrdpemggkprrknpqeglynelqkdk |
| | | [sequence omitted] |

CAR 3

| | | |
|---|---|---|
| CAR3 scFv | 903 | qvqlqesgpglvkpsetlsltctvsgvslpdygvswirqppgkglewigviwgse |
| domain | | ttyyssslksrvtiskdnsknqvslklssvtaadtavyycakhyyyggsyamdyw |
| | | gqgtlvtvssggggsggggsggggseivmtqspatlslspgeratlscrasqdis |
| | | kylnwyqqkpgqaprlliyhtsrlhsgiparfsgsgsgtdytltisslqpedfav |
| | | yfcqqgntlpytfgqgtkleik |
| 103104 | 904 | atggctctgcccgtgaccgcactcctcctgccactggctctgctgcttcacgccg |
| CAR 3- | | ctcgcccacaagtccagcttcaagaatcagggcctggtctggtgaagccatctga |
| Soluble | | gactctgtccctcacttgcaccgtgagcggagtgtccctcccagactacggagtg |
| scFv-nt | | agctggattagacagcctcccggaaagggactggagtggatcggagtgatttggg |
| | | gtagcgaaaccacttactattcatcttccctgaagtcacgggtcaccatttcaaa |
| | | ggataactcaaagaatcaagtgagcctcaagctctcatcagtcaccgccgctgac |
| | | accgccgtgtattactgtgccaagcattactactatggagggtcctacgccatgg |
| | | actactggggccagggaactctggtcactgtgtcatctggtggaggaggtagcgg |
| | | aggaggcgggagcggtggaggtggctccgaaatcgtgatgacccagagccctgca |
| | | accctgtccctttctcccggggaacgggctaccctttcttgtcgggcatcacaag |
| | | atatctcaaaatacctcaattggtatcaacagaagccgggacaggcccctaggct |
| | | tcttatctaccacacctctcgcctgcatagcgggattcccgcacgctttagcggg |
| | | tctggaagcgggaccgactacactctgaccatctcatctctccagcccgaggact |
| | | tcgccgtctacttctgccagcagggtaacaccctgccgtacaccttcggccaggg |
| | | caccaagcttgagatcaaacatcaccaccatcatcaccatcac |
| 103104 | 905 | MALPVTALLLPLALLLHAARPqvqlqesqpglvkpsetlsltctvsgvslpdygv |
| CAR 3- | | swirqppgkglewigviwgsettyyssslksrvtiskdnsknqvslklssvtaad |
| Soluble | | tavyycakhyyyggsyamdywgqgtlvtvssggggsggggsggggseivmtqspa |
| scFv-aa | | tlslspgeratlscrasqdiskylnwyqqkpgqaprlliyhtsrlhsgiparfsg |
| | | sgsgtdytltisslqpedfavyfcqqgntlpytfgqgtkleikhhhhhhhh |
| 104877 | 906 | atggctctgcccgtgaccgcactcctcctgccactggctctgctgcttcacgccg |
| CAR 3- | | ctcgcccacaagtccagcttcaagaatcagggcctggtctggtgaagccatctga |
| Full-nt | | gactctgtccctcacttgcaccgtgagcggagtgtccctcccagactacggagtg |
| | | agctggattagacagcctcccggaaagggactggagtggatcggagtgatttggg |
| | | gtagcgaaaccacttactattcatcttccctgaagtcacgggtcaccatttcaaa |
| | | ggataactcaaagaatcaagtgagcctcaagctctcatcagtcaccgccgctgac |
| | | accgccgtgtattactgtgccaagcattactactatggagggtcctacgccatgg |
| | | actactggggccagggaactctggtcactgtgtcatctggtggaggaggtagcgg |
| | | aggaggcgggagcggtggaggtggctccgaaatcgtgatgacccagagccctgca |
| | | accctgtccctttctcccggggaacgggctaccctttcttgtcgggcatcacaag |
| | | atatctcaaaatacctcaattggtatcaacagaagccgggacaggcccctaggct |
| | | tcttatctaccacacctctcgcctgcatagcgggattcccgcacgctttagcggg |
| | | tctggaagcgggaccgactacactctgaccatctcatctctccagcccgaggact |
| | | tcgccgtctacttctgccagcagggtaacaccctgccgtacaccttcggccaggg |
| | | caccaagcttgagatcaaaaccactactcccgctccaaggccacccacccctgcc |
| | | ccgaccatcgcctctcagccgctttccctgcgtccggaggcatgtagacccgcag |
| | | ctggtggggccgtgcatacccggggtcttgacttcgcctgcgatatctacatttg |
| | | ggcccctctggctggtacttgcggggtcctgctgctttcactcgtgatcactctt |
| | | tactgtaagcgcggtcggaagaagctgctgtacatctttaagcaacccttcatga |
| | | ggcctgtgcagactactcaagaggaggacggctgttcatgccggttcccagagga |
| | | ggaggaaggcggctgcgaactgcgcgtgaaattcagccgcagcgcagatgctcca |
| | | gcctacaagcaggggcagaaccagctctacaacgaactcaatcttggtcggagag |
| | | aggagtacgacgtgctggacaagcggagaggacgggacccagaaatgggcgggaa |
| | | gccgcgcagaaagaatccccaagagggcctgtacaacgagctccaaaaggataag |
| | | atggcagaagcctatagcgagattggtatgaaaggggaacgcagaagaggcaaag |
| | | gccacgacggactgtaccagggactcagcaccgccaccaaggacacctatgacgc |
| | | tcttcacatgcaggccctgccgcctcgg |
| 104877 | 907 | MALPVTALLLPLALLLHAARPqvqlqesgpglvkpsetlsltctvsgvslpdygv |
| CAR 3- | | swirqppqkglewigviwgsettyyssslksrvtiskdnsknqvslklssvtaad |
| Full-aa | | tavyycakhyyyggsyamdywgqqtlvtvssggggsggggsggggseivmtqspa |
| | | tlslspgeratlscrasqdiskylnwyqqkpqqaprlliyhtsrlhsqiparfsg |
| | | sgsgtdytltisslqpedfavyfcqqgntlpytfqqqtkleiktttpaprpptpa |
| | | ptiasqplslrpeacrpaaggavhtrgldfacdiyiwaplagtcgvlllslvitl |
| | | yckrgrkkllyifkqpfmrpvqttqeedgcscrfpeeeeggcelrvkfsrsadap |
| | | aykqgqnqlynelnlgrreeydvldkrrgrdpemggkprrknpqeglynelqkdk |
| | | [sequence omitted] |

CAR 4

| | | |
|---|---|---|
| CAR4 scFv | 908 | qvqlqesgpglvkpsetlsltctvsgvslpdygvswirqppgkglewigviwgse |
| domain | | ttyyqsslksrvtiskdnsknqvslklssvtaadtavyycakhyyyggsyamdyw |
| | | gqgtlvtvssggggsggggsggggseivmtqspatlslspgeratlscrasqdis |
| | | kylnwyqqkpgqaprlliyhtsrlhsgiparfsgsgsgtdytltisslqpedfav |
| | | yfcqqgntlpytfgqgtkleik |
| 103106 | 909 | atggctctgcccgtgaccgcactcctcctgccactggctctgctgcttcacgccg |
| CAR4- | | ctcgcccacaagtccagcttcaagaatcagggcctggtctggtgaagccatctga |
| Soluble | | gactctgtccctcacttgcaccgtgagcggagtgtccctcccagactacggagtg |
| scFv-nt | | agctggattagacagcctcccggaaagggactggagtggatcggagtgatttggg |
| | | gtagcgaaaccacttactatcaatcttccctgaagtcacgggtcaccatttcaaa |
| | | ggataactcaaagaatcaagtgagcctcaagctctcatcagtcaccgccgctgac |
| | | accgccgtgtattactgtgccaagcattactactatggagggtcctacgccatgg |
| | | actactggggccagggaactctggtcactgtgtcatctggtggaggaggtagcgg |
| | | aggaggcgggagcggtggaggtggctccgaaatcgtgatgacccagagccctgca |
| | | accctgtccctttctcccggggaacgggctaccctttcttgtcgggcatcacaag |
| | | atatctcaaaatacctcaattggtatcaacagaagccgggacaggcccctaggct |
| | | tcttatctaccacacctctcgcctgcatagcgggattcccgcacgctttagcggg |
| | | tctggaagcgggaccgactacactctgaccatctcatctctccagcccgaggact |
| | | tcgccgtctacttctgccagcagggtaacaccctgccgtacaccttcggccaggg |
| | | caccaagcttgagatcaaacatcaccaccatcatcaccatcac |
| 103106 | 910 | MALPVTALLLPLALLLHAARPqvqlqesgpglvkpsetlsltctvsgvslpdygv |
| CAR4- | | swirqppgkglewigviwgsettyyqsslksrvtiskdnsknqvslklssvtaad |
| Soluble | | tavyycakhyyyggsyamdywgqgtlvtvssggggsggggsggggseivmtqspa |
| scFv-aa | | tlslspgeratlserasqdiskylnwyqqkpgqaprlliyhtsrlhsgiparfsg |
| | | sgsgtdytltisslqpedfavyfcqqqntlpytfgqqtkleikhhhhhhhh |
| 104878 | 911 | atggctctgcccgtgaccgcactcctcctgccactggctctgctgcttcacgccg |
| CAR 4- | | ctcgcccacaagtccagcttcaagaatcagggcctggtctggtgaagccatctga |
| Full-nt | | gactctgtccctcacttgcaccgtgagcggagtgtccctcccagactacggagtg |
| | | agctggattagacagcctcccggaaagggactggagtggatcggagtgatttggg |
| | | gtagcgaaaccacttactatcaatcttccctgaagtcacgggtcaccatttcaaa |
| | | ggataactcaaagaatcaagtgagcctcaagctctcatcagtcaccgccgctgac |
| | | accgccgtgtattactgtgccaagcattactactatggagggtcctacgccatgg |
| | | actactggggccagggaactctggtcactgtgtcatctggtggaggaggtagcgg |
| | | aggaggcgggagcggtggaggtggctccgaaatcgtgatgacccagagccctgca |
| | | accctgtccctttctcccggggaacgggctaccctttcttgtcgggcatcacaag |
| | | atatctcaaaatacctcaattggtatcaacagaagccgggacaggcccctaggct |
| | | tcttatctaccacacctctcgcctgcatagcgggattcccgcacgctttagcggg |
| | | tctggaagcgggaccgactacactctgaccatctcatctctccagcccgaggact |
| | | tcgccgtctacttctgccagcagggtaacaccctgccgtacaccttcggccaggg |
| | | caccaagcttgagatcaaaaccactactcccgctccaaggccacccacccctgcc |
| | | ccgaccatcgcctctcagccgctttccctgcgtccggaggcatgtagacccgcag |
| | | ctggtggggccgtgcatacccggggtcttgacttcgcctgcgatatctacatttg |
| | | ggcccctctggctggtacttgcggggtcctgctgctttcactcgtgatcactctt |
| | | tactgtaagcgcggtcggaagaagctgctgtacatctttaagcaacccttcatga |
| | | ggcctgtgcagactactcaagaggaggacggctgttcatgccggttcccagagga |
| | | ggaggaaggcggctgcgaactgcgcgtgaaattcagccgcagcgcagatgctcca |
| | | gcctacaagcaggggcagaaccagctctacaacgaactcaatcttggtcggagag |
| | | aggagtacgacgtgctggacaagcggagaggacgggacccagaaatgggcgggaa |
| | | gccgcgcagaaagaatccccaagagggcctgtacaacgagctccaaaaggataag |
| | | atggcagaagcctatagcgagattggtatgaaaggggaacgcagaagaggcaaag |
| | | gccacgacggactgtaccagggactcagcaccgccaccaaggacacctatgacgc |
| | | tcttcacatgcaggccctgccgcctcgg |
| 104878 | 912 | MALPVTALLLPLALLLHAARPqvqlqesgpglvkpsetlsltctvsgvslpdygv |
| CAR 4- | | swirqppqkglewigviwgsettyyqsslksrvtiskdnsknqvslklssvtaad |
| Full-aa | | tavyycakhyyyggsyamdywgqqtlvtvssggggsggggsggggseivmtqspa |
| | | tlslspgeratlscrasqdiskylnwyqqkpqqaprlliyhtsrlhsqiparfsg |
| | | sgsgtdytltisslqpedfavyfcqqgntlpytfqqqtkleiktttpaprpptpa |
| | | ptiasqplslrpeacrpaaggavhtrgldfacdiyiwaplagtcgvlllslvitl |
| | | yckrgrkkllyifkqpfmrpvqttqeedgcscrfpeeeeggcelrvkfsrsadap |
| | | aykqgqnqlynelnlgrreeydvldkrrgrdpemggkprrknpqeglynelqkdk |
| | | [sequence omitted] |

CAR 5

| | | |
|---|---|---|
| CAR5 scFv | 913 | eivmtqspatlslspgeratlscrasqdiskylnwyqqkpgqaprlliyhtsrlh |
| domain | | sgiparfsgsgsgtdytItisslqpedfavyfcqqgntlpytfgqgtkleikggg |
| | | gsggggsggggsggggsqvqlqesgpglvkpsetlsltctvsgvslpdygvswir |
| | | qppgkglewigviwgsettyyssslksrvtiskdnsknqvslklssvtaadtavy |
| | | ycakhyyyggsyamdywgqgtlvtvss |
| 99789 | 914 | atggccctcccagtgaccgctctgctgctgcctctcgcacttcttctccatgccg |
| CAR5- | | ctcggcctgagatcgtcatgacccaaagccccgctaccctgtccctgtcacccgg |
| Soluble | | cgagagggcaaccctttcatgcagggccagccaggacatttctaagtacctcaac |
| scFv-nt | | tggtatcagcagaagccagggcaggctcctcgcctgctgatctaccacaccagcc |
| | | gcctccacagcggtatccccgccagattttccgggagcgggtctggaaccgacta |
| | | caccctcaccatctcttctctgcagcccgaggatttcgccgtctatttctgccag |
| | | caggggaatactctgccgtacaccttcggtcaaggtaccaagctggaaatcaagg |
| | | gaggcggaggatcaggcggtggcggaagcggaggaggtggctccggaggaggagg |
| | | ttcccaagtgcagcttcaagaatcaggacccggacttgtgaagccatcagaaacc |
| | | ctctccctgacttgtaccgtgtccggtgtgagcctccccgactacggagtctctt |
| | | ggattcgccagcctccggggaagggtcttgaatggattggggtgatttggggatc |
| | | agagactacttactactcttcatcacttaagtcacgggtcaccatcagcaaagat |
| | | aatagcaagaaccaagtgtcacttaagctgtcatctgtgaccgccgctgacaccg |
| | | ccgtgtactattgtgccaaacattactattacggagggtcttatgctatggacta |
| | | ctggggacaggggaccctggtgactgtctctagccatcaccatcaccaccatcat |
| | | cac |
| 99789 | 915 | MALPVTALLLPLALLLHAARPeivmtqspatlslspgeratlserasqdiskyln |
| CAR5- | | wyqqkpgqaprlliyhtsrlhsgiparfsgsgsgtdytltisslqpedfavyfcq |
| Soluble | | qgntlpytfgqgtkleikggggsggggsggggsggggsqvqlqesgpglvkpset |
| scFv-aa | | lsltctvsgvslpdygvswirqppgkglewigviwgsettyyssslksrvtiskd |
| | | nsknqvslklssvtaadtavyycakhyyyqgsyamdywgqqtIvtvsshhhhhhhh |
| | | h |
| 104879 | 916 | atggccctccctgtcaccgccctgctgcttccgctggctcttctgctccacgccg |
| CAR 5- | | ctcggcccgaaattgtgatgacccagtcacccgccactcttagcctttcacccgg |
| Full-nt | | tgagcgcgcaaccctgtcttgcagagcctcccaagacatctcaaaataccttaat |
| | | tggtatcaacagaagcccggacaggctcctcgccttctgatctaccacaccagcc |
| | | ggctccattctggaatccctgccaggttcagcggtagcggatctgggaccgacta |
| | | caccctcactatcagctcactgcagccagaggacttcgctgtctatttctgtcag |
| | | caagggaacaccctgccctacacctttggacagggcaccaagctcgagattaaag |
| | | gtggaggtggcagcggaggaggtgggtccggcggtggaggaagcggcggaggcgg |
| | | gagccaggtccaactccaagaaagcggaccgggtcttgtgaagccatcagaaact |
| | | ctttcactgacttgtactgtgagcggagtgtctctccccgattacggggtgtctt |
| | | ggatcagacagccaccggggaagggtctggaatggattggagtgatttggggctc |
| | | tgagactacttactactcttcatccctcaagtcacgcgtcaccatctcaaaggac |
| | | aactctaagaatcaggtgtcactgaaactgtcatctgtgaccgcagccgacaccg |
| | | ccgtgtactattgcgctaagcattactattatggcgggagctacgcaatggatta |
| | | ctggggacagggtactctggtcaccgtgtccagcaccactaccccagcaccgagg |
| | | ccacccaccccggctcctaccatcgcctcccagcctctgtccctgcgtccggagg |
| | | catgtagacccgcagctggtggggccgtgcatacccggggtcttgacttcgcctg |
| | | cgatatctacatttgggcccctctggctggtacttgcggggtcctgctgctttca |
| | | ctcgtgatcactctttactgtaagcgcggtcggaagaagctgctgtacatcttta |
| | | agcaacccttcatgaggcctgtgcagactactcaagaggaggacggctgttcatg |
| | | ccggttcccagaggaggaggaaggcggctgcgaactgcgcgtgaaattcagccgc |
| | | agcgcagatgctccagcctacaagcaggggcagaaccagctctacaacgaactca |
| | | atcttggtcggagagaggagtacgacgtgctggacaagcggagaggacgggaccc |
| | | agaaatgggcgggaagccgcgcagaaagaatccccaagagggcctgtacaacgag |
| | | ctccaaaaggataagatggcagaagcctatagcgagattggtatgaaaggggaac |
| | | gcagaagaggcaaaggccacgacggactgtaccagggactcagcaccgccaccaa |
| | | ggacacctatgacgctcttcacatgcaggccctgccgcctcgg |
| 104879 | 917 | MALPVTALLLPLALLLHAARPeivmtqspatlslspgeratlscrasqdiskyln |
| CAR 5- | | wyqqkpgqaprlliyhtsrlhsgiparfsgsgsgtdytltisslqpedfavyfcq |
| Full-aa | | qgntlpytfgqqtkleikggggsggggsggggsggggsqvqlqesqpglvkpset |
| | | lsltctvsqvslpdygvswirqppqkglewigviwgsettyyssslksrvtiskd |
| | | nsknqvslklssvtaadtavyycakhyyyggsyamdywqqqtlvtvsstttpapr |
| | | pptpaptiasqplslrpeacrpaaggavhtrgldfacdiyiwaplagtcgvllls |
| | | lvitlyckrgrkkllyifkqpfmrpvqttqeedgcscrfpeeeeggcelrvkfsr |
| | | sadapaykqgqnqlynelnlgrreeydvldkrrgrdpemggkprrknpqeglyne |
| | | lqkdkmaeayseigmkgerrrgkghdglyqglstatkdtydalhmqalppr |

CAR 6

| | | |
|---|---|---|
| CAR6 | 918 | eivmtqspatlslspgeratlscrasqdiskylnwyqqkpgqaprlliyhtsrlh |
| scFv | | sgiparfsgsgsgtdytltisslqpedfavyfcqqgntlpytfgqgtkleikggg |
| domain | | gsggggsggggsggggsqvqlqesgpglvkpsetlsltctvsgvslpdygvswir |
| | | qppgkglewigviwgsettyyqsslksrvtiskdnsknqvslklssvtaadtavy |
| | | ycakhyyyggsyamdywgqgtlvtvss |
| 99790 | 919 | atggccctcccagtgaccgctctgctgctgcctctcgcacttcttctccatgccg |
| CAR6- | | ctcggcctgagatcgtcatgacccaaagccccgctaccctgtccctgtcacccgg |
| Soluble | | cgagagggcaaccctttcatgcagggccagccaggacatttctaagtacctcaac |
| scFv-nt | | tggtatcagcagaagccagggcaggctcctcgcctgctgatctaccacaccagcc |
| | | gcctccacagcggtatccccgccagattttccgggagcgggtctggaaccgacta |
| | | caccctcaccatctcttctctgcagcccgaggatttcgccgtctatttctgccag |
| | | caggggaatactctgccgtacaccttcggtcaaggtaccaagctggaaatcaagg |
| | | gaggcggaggatcaggcggtggcggaagcggaggaggtggctccggaggaggagg |
| | | ttcccaagtgcagcttcaagaatcaggacccggacttgtgaagccatcagaaacc |
| | | ctctccctgacttgtaccgtgtccggtgtgagcctccccgactacggagtctctt |
| | | ggattcgccagcctccggggaagggtcttgaatggattggggtgatttggggatc |
| | | agagactacttactaccagtcatcacttaagtcacgggtcaccatcagcaaagat |
| | | aatagcaagaaccaagtgtcacttaagctgtcatctgtgaccgccgctgacaccg |
| | | ccgtgtactattgtgccaaacattactattacggagggtcttatgctatggacta |
| | | ctggggacaggggaccctggtgactgtctctagccatcaccatcaccaccatcat |
| | | cac |
| 99790 | 920 | MALPVTALLLPLALLLHAARPeivmtqspatlslspgeratlscrasqdiskyln |
| CAR6- | | wyqqkpgqaprlliyhtsrlhsgiparfsgsgsgtdytltisslqpedfavyfcq |
| Soluble | | qgntlpytfgqgtkleikggggsggggsggggsggggsqvqlqesgpglvkpset |
| scFv-aa | | lsltctvsgvslpdygvswirqppgkglewigviwgsettyyqsslksrvtiskd |
| | | nsknqvslklssvtaadtavyycakhyyyqgsyamdywgqqtlvtvsshhhhhhhh |
| | | h |
| 104880 | 921 | atggccctccctgtcaccgccctgctgcttccgctggctcttctgctccacgccg |
| CAR6- | | ctcggcccgaaattgtgatgacccagtcacccgccactcttagcctttcacccgg |
| Full-nt | | tgagcgcgcaaccctgtcttgcagagcctcccaagacatctcaaaataccttaat |
| | | tggtatcaacagaagcccggacaggctcctcgccttctgatctaccacaccagcc |
| | | ggctccattctggaatccctgccaggttcagcggtagcggatctgggaccgacta |
| | | caccctcactatcagctcactgcagccagaggacttcgctgtctatttctgtcag |
| | | caagggaacaccctgccctacacctttggacagggcaccaagctcgagattaaag |
| | | gtggaggtggcagcggaggaggtgggtccggcggtggaggaagcggaggcggagg |
| | | gagccaggtccaactccaagaaagcggaccgggtcttgtgaagccatcagaaact |
| | | ctttcactgacttgtactgtgagcggagtgtctctccccgattacggggtgtctt |
| | | ggatcagacagccaccggggaagggtctggaatggattggagtgatttggggctc |
| | | tgagactacttactaccaatcatccctcaagtcacgcgtcaccatctcaaaggac |
| | | aactctaagaatcaggtgtcactgaaactgtcatctgtgaccgcagccgacaccg |
| | | ccgtgtactattgcgctaagcattactattatggcgggagctacgcaatggatta |
| | | ctggggacagggtactctggtcaccgtgtccagcaccactaccccagcaccgagg |
| | | ccacccaccccggctcctaccatcgcctcccagcctctgtccctgcgtccggagg |
| | | catgtagacccgcagctggtggggccgtgcatacccggggtcttgacttcgcctg |
| | | cgatatctacatttgggcccctctggctggtacttgcggggtcctgctgctttca |
| | | ctcgtgatcactctttactgtaagcgcggtcggaagaagctgctgtacatcttta |
| | | agcaacccttcatgaggcctgtgcagactactcaagaggaggacggctgttcatg |
| | | ccggttcccagaggaggaggaaggcggctgcgaactgcgcgtgaaattcagccgc |
| | | agcgcagatgctccagcctacaagcaggggcagaaccagctctacaacgaactca |
| | | atcttggtcggagagaggagtacgacgtgctggacaagcggagaggacgggaccc |
| | | agaaatgggcgggaagccgcgcagaaagaatccccaagagggcctgtacaacgag |
| | | ctccaaaaggataagatggcagaagcctatagcgagattggtatgaaaggggaac |
| | | gcagaagaggcaaaggccacgacggactgtaccagggactcagcaccgccaccaa |
| | | ggacacctatgacgctcttcacatgcaggccctgccgcctcgg |
| 104880 | 922 | MALPVTALLLPLALLLHAARPeivmtqspatlslspgeratlscrasqdiskyln |
| CAR6- | | wyqqkpgqaprlliyhtsrlhsgiparfsgsgsgtdytltisslqpedfavyfcq |
| Full-aa | | qgntlpytfgqqtkleikggggsggggsggggsggggsqvqlqesqpglvkpset |
| | | lsltctvsqvslpdygvswirqppqkglewigviwgsettyyqsslksrvtiskd |
| | | nsknqvslklssvtaadtavyycakhyyyggsyamdywqqqtlvtvsstttpapr |
| | | pptpaptiasqplslrpeacrpaaggavhtrgldfacdiyiwaplagtcgvllls |
| | | lvitlyckrgrkkllyifkqpfmrpvqttqeedgcscrfpeeeeggcelrvkfsr |
| | | sadapaykqgqnqlynelnlgrreeydvldkrrgrdpemggkprrknpqeglyne |
| | | lqkdkmaeayseigmkgerrrgkghdglyqglstatkdtydalhmqalppr |

CAR 7

| | | |
|---|---|---|
| CAR7 scFv | 923 | qvqlqesgpglvkpsetlsltctvsgvslpdygvswirqppgkglewigviwgse |
| domain | | ttyyssslksrvtiskdnsknqvslklssvtaadtavyycakhyyyggsyamdyw |
| | | gqgtlvtvssggggsggggsggggsggggseivmtqspatlslspgeratlscra |
| | | sqdiskylnwyqqkpgqaprlliyhtsrlhsgiparfsgsgsgtdytltisslqp |
| | | edfavyfcqqgntlpytfgqgtkleik |
| 100796 | 924 | atggcactgcctgtcactgccctcctgctgcctctggccctccttctgcatgccg |
| CAR7- | | ccaggccccaagtccagctgcaagagtcaggacccggactggtgaagccgtctga |
| Soluble | | gactctctcactgacttgtaccgtcagcggcgtgtccctccccgactacggagtg |
| scFv-nt | | tcatggatccgccaacctcccgggaaagggcttgaatggattggtgtcatctggg |
| | | gttctgaaaccacctactactcatcttccctgaagtccagggtgaccatcagcaa |
| | | ggataattccaagaaccaggtcagccttaagctgtcatctgtgaccgctgctgac |
| | | accgccgtgtattactgcgccaagcactactattacggaggaagctacgctatgg |
| | | actattggggacagggcactctcgtgactgtgagcagcggcggtggagggtctgg |
| | | aggtggaggatccggtggtggtgggtcaggcggaggagggagcgagattgtgatg |
| | | actcagtcaccagccaccctttctctttcacccggcgagagagcaaccctgagct |
| | | gtagagccagccaggacatttctaagtacctcaactggtatcagcaaaaaccggg |
| | | gcaggcccctcgcctcctgatctaccatacctcacgccttcactctggtatcccc |
| | | gctcggtttagcggatcaggatctggtaccgactacactctgaccatttccagcc |
| | | tgcagccagaagatttcgcagtgtatttctgccagcagggcaatacccttcctta |
| | | caccttcggtcagggaaccaagctcgaaatcaagcaccatcaccatcatcaccac |
| | | cat |
| 100796 | 925 | MALPVTALLLPLALLLHAARPqvqlqesqpglvkpsetlsltctvsgvslpdygv |
| CAR7- | | swirqppgkglewigviwgsettyyssslksrvtiskdnsknqvslklssvtaad |
| Soluble | | tavyycakhyyyggsyamdywgqgtlvtvssggggsggggsggggsggggseivm |
| scFv-aa | | tqspatlslspgeratlscrasqdiskylnwyqqkpgqaprlliyhtsrlhsgip |
| | | arfsgsgsgtdytltisslqpedfavyfcqqqntlpytfgqqtkleikhhhhhhhh |
| | | h |
| 104881 | 926 | atggctctgcccgtgaccgcactcctcctgccactggctctgctgcttcacgccg |
| CAR 7 | | ctcgcccacaagtccagcttcaagaatcagggcctggtctggtgaagccatctga |
| Full-nt | | gactctgtccctcacttgcaccgtgagcggagtgtccctcccagactacggagtg |
| | | agctggattagacagcctcccggaaagggactggagtggatcggagtgatttggg |
| | | gtagcgaaaccacttactattcatcttccctgaagtcacgggtcaccatttcaaa |
| | | ggataactcaaagaatcaagtgagcctcaagctctcatcagtcaccgccgctgac |
| | | accgccgtgtattactgtgccaagcattactactatggagggtcctacgccatgg |
| | | actactggggccagggaactctggtcactgtgtcatctggtggaggaggtagcgg |
| | | aggaggcgggagcggtggaggtggctccggaggtggcggaagcgaaatcgtgatg |
| | | acccagagccctgcaaccctgtccctttctcccggggaacgggctaccctttctt |
| | | gtcgggcatcacaagatatctcaaaatacctcaattggtatcaacagaagccggg |
| | | acaggcccctaggcttcttatctaccacacctctcgcctgcatagcgggattccc |
| | | gcacgctttagcgggtctggaagcgggaccgactacactctgaccatctcatctc |
| | | tccagcccgaggacttcgccgtctacttctgccagcagggtaacaccctgccgta |
| | | caccttcggccagggcaccaagcttgagatcaaaaccactactcccgctccaagg |
| | | ccacccacccctgccccgaccatcgcctctcagccgctttccctgcgtccggagg |
| | | catgtagacccgcagctggtggggccgtgcatacccggggtcttgacttcgcctg |
| | | cgatatctacatttgggcccctctggctggtacttgcggggtcctgctgctttca |
| | | ctcgtgatcactctttactgtaagcgcggtcggaagaagctgctgtacatcttta |
| | | agcaacccttcatgaggcctgtgcagactactcaagaggaggacggctgttcatg |
| | | ccggttcccagaggaggaggaaggcggctgcgaactgcgcgtgaaattcagccgc |
| | | agcgcagatgctccagcctacaagcaggggcagaaccagctctacaacgaactca |
| | | atcttggtcggagagaggagtacgacgtgctggacaagcggagaggacgggaccc |
| | | agaaatgggcgggaagccgcgcagaaagaatccccaagagggcctgtacaacgag |
| | | ctccaaaaggataagatggcagaagcctatagcgagattggtatgaaaggggaac |
| | | gcagaagaggcaaaggccacgacggactgtaccagggactcagcaccgccaccaa |
| | | ggacacctatgacgctcttcacatgcaggccctgccgcctcgg |
| 104881 | 927 | MALPVTALLLPLALLLHAARPqvqlqesqpglvkpsetlsltctvsgvslpdygv |
| CAR 7 | | swirqppqkglewigviwgsettyyssslksrvtiskdnsknqvslklssvtaad |
| Full-aa | | tavyycakhyyyggsyamdywgqqtlvtvssggggsggggsggggsggggseivm |
| | | tqspatlslspqeratlscrasqdiskylnwyqqkpqqaprlliyhtsrlhsqip |
| | | arfsgsgsgtdyt1tisslqpedfavyfcqqgntlpytfqqqtkleiktttpapr |
| | | pptpaptiasqplslrpeacrpaaggavhtrgldfacdiyiwaplagtcgvllls |
| | | lvitlyckrgrkkllyifkqpfmrpvqttqeedgcscrfpeeeeggcelrvkfsr |
| | | sadapaykqgqnqlynelnlgrreeydvldkrrgrdpemggkprrknpqeglyne |
| | | lqkdkmaeayseigmkgerrrgkghdglyqglstatkdtydalhmqalppr |

CAR 8

| | | |
|---|---|---|
| CAR8 scFv | 928 | qvqlqesgpglvkpsetlsltctvsgvslpdygvswirqppgkglewigviwgse |
| domain | | ttyyqsslksrvtiskdnsknqvslklssvtaadtavyycakhyyyggsyamdyw |
| | | gqgtlvtvssggggsggggsggggsggggseivmtqspatlslspgeratlscra |
| | | sqdiskylnwyqqkpgqaprlliyhtsrlhsgiparfsgsgsgtdytltisslqp |
| | | edfavyfcqqgntlpytfgqgtkleik |
| 100798 | 929 | atggcactgcctgtcactgccctcctgctgcctctggccctccttctgcatgccg |
| CAR8- | | ccaggccccaagtccagctgcaagagtcaggacccggactggtgaagccgtctga |
| Soluble | | gactctctcactgacttgtaccgtcagcggcgtgtccctccccgactacggagtg |
| scFv-nt | | tcatggatccgccaacctcccgggaaagggcttgaatggattggtgtcatctggg |
| | | gttctgaaaccacctactaccagtcttccctgaagtccagggtgaccatcagcaa |
| | | ggataattccaagaaccaggtcagccttaagctgtcatctgtgaccgctgctgac |
| | | accgccgtgtattactgcgccaagcactactattacggaggaagctacgctatgg |
| | | actattggggacagggcactctcgtgactgtgagcagcggcggtggagggtctgg |
| | | aggtggaggatccggtggtggtgggtcaggcggaggagggagcgagattgtgatg |
| | | actcagtcaccagccaccctttctctttcacccggcgagagagcaaccctgagct |
| | | gtagagccagccaggacatttctaagtacctcaactggtatcagcaaaaaccggg |
| | | gcaggcccctcgcctcctgatctaccatacctcacgccttcactctggtatcccc |
| | | gctcggtttagcggatcaggatctggtaccgactacactctgaccatttccagcc |
| | | tgcagccagaagatttcgcagtgtatttctgccagcagggcaatacccttcctta |
| | | caccttcggtcagggaaccaagctcgaaatcaagcaccatcaccatcatcatcac |
| | | cac |
| 100798 | 930 | MALPVTALLLPLALLLHAARPqvqlqesqpglvkpsetlsltctvsgvslpdygv |
| CAR8- | | swirqppgkglewigviwgsettyyqsslksrvtiskdnsknqvslklssvtaad |
| Soluble | | tavyycakhyyyggsyamdywgqgtlvtvssggggsggggsggggsggggseivm |
| scFv-aa | | tqspatlslspgeratlscrasqdiskylnwyqqkpgqaprlliyhtsrlhsgip |
| | | arfsgsgsgtdytltisslqpedfavyfcqqgntlpytfgqgtkleikhhhhhhh |
| | | h |
| 104882 | 931 | atggctctgcccgtgaccgcactcctcctgccactggctctgctgcttcacgccg |
| CAR 8- | | ctcgcccacaagtccagcttcaagaatcagggcctggtctggtgaagccatctga |
| Full-nt | | gactctgtccctcacttgcaccgtgagcggagtgtccctcccagactacggagtg |
| | | agctggattagacagcctcccggaaagggactggagtggatcggagtgatttggg |
| | | gtagcgaaaccacttactatcaatcttccctgaagtcacgggtcaccatttcaaa |
| | | ggataactcaaagaatcaagtgagcctcaagctctcatcagtcaccgccgctgac |
| | | accgccgtgtattactgtgccaagcattactactatggagggtcctacgccatgg |
| | | actactggggccagggaactctggtcactgtgtcatctggtggaggaggtagcgg |
| | | aggaggcgggagcggtggaggtggctccggaggcggtgggtcagaaatcgtgatg |
| | | acccagagccctgcaaccctgtccctttctcccggggaacgggctaccctttctt |
| | | gtcgggcatcacaagatatctcaaaatacctcaattggtatcaacagaagccggg |
| | | acaggcccctaggcttcttatctaccacacctctcgcctgcatagcgggattccc |
| | | gcacgctttagcgggtctggaagcgggaccgactacactctgaccatctcatctc |
| | | tccagcccgaggacttcgccgtctacttctgccagcagggtaacaccctgccgta |
| | | caccttcggccagggcaccaagcttgagatcaaaaccactactcccgctccaagg |
| | | ccacccacccctgccccgaccatcgcctctcagccgctttccctgcgtccggagg |
| | | catgtagacccgcagctggtggggccgtgcatacccggggtcttgacttcgcctg |
| | | cgatatctacatttgggcccctctggctggtacttgcggggtcctgctgctttca |
| | | ctcgtgatcactctttactgtaagcgcggtcggaagaagctgctgtacatcttta |
| | | agcaacccttcatgaggcctgtgcagactactcaagaggaggacggctgttcatg |
| | | ccggttcccagaggaggaggaaggcggctgcgaactgcgcgtgaaattcagccgc |
| | | agcgcagatgctccagcctacaagcaggggcagaaccagctctacaacgaactca |
| | | atcttggtcggagagaggagtacgacgtgctggacaagcggagaggacgggaccc |
| | | agaaatgggcgggaagccgcgcagaaagaatccccaagagggcctgtacaacgag |
| | | ctccaaaaggataagatggcagaagcctatagcgagattggtatgaaaggggaac |
| | | gcagaagaggcaaaggccacgacggactgtaccagggactcagcaccgccaccaa |
| | | ggacacctatgacgctcttcacatgcaggccctgccgcctcgg |
| 104882 | 932 | MALPVTALLLPLALLLHAARPqvqlqesgpglvkpsetlsltctvsgvslpdygv |
| CAR 8- | | swirqppqkglewigviwgsettyyqsslksrvtiskdnsknqvslklssvtaad |
| Full-aa | | tavyycakhyyyggsyamdywgqqtlvtvssggggsggggsggggsggggseivm |
| | | tqspatlslspqeratlscrasqdiskylnwyqqkpqqaprlliyhtsrlhsqip |
| | | arfsgsgsgtdytltisslqpedfavyfcqqgntlpytfqqqtkleiktttpapr |
| | | pptpaptiasqplslrpeacrpaaggavhtrgldfacdiyiwaplagtcgvllls |
| | | lvitlyckrgrkkllyifkqpfmrpvqttqeedgcscrfpeeeeggcelrvkfsr |
| | | sadapaykqgqnqlynelnlgrreeydvldkrrgrdpemggkprrknpqeglyne |
| | | lqkdkmaeayseigmkgerrrgkghdglyqglstatkdtydalhmqalppr |

CAR 9

| | | |
|---|---|---|
| CAR9 scFv | 933 | eivmtqspatlslspgeratlscrasqdiskylnwyqqkpgqaprlliyhtsrlh |
| domain | | sgiparfsgsgsgtdytltisslqpedfavyfcqqgntlpytfgqgtkleikggg |
| | | gsggggsggggsggggsqvqlqesgpglvkpsetlsltctvsgvslpdygvswir |
| | | qppgkglewigviwgsettyynsslksrvtiskdnsknqvslklssvtaadtavy |
| | | ycakhyyyggsyamdywgqgtlvtvss |
| 99789 | 934 | atggccctcccagtgaccgctctgctgctgcctctcgcacttcttctccatgccg |
| CAR9- | | ctcggcctgagatcgtcatgacccaaagccccgctaccctgtccctgtcacccgg |
| Soluble | | cgagagggcaaccctttcatgcagggccagccaggacatttctaagtacctcaac |
| scFv-nt | | tggtatcagcagaagccagggcaggctcctcgcctgctgatctaccacaccagcc |
| | | gcctccacagcggtatccccgccagattttccgggagcgggtctggaaccgacta |
| | | caccctcaccatctcttctctgcagcccgaggatttcgccgtctatttctgccag |
| | | caggggaatactctgccgtacaccttcggtcaaggtaccaagctggaaatcaagg |
| | | gaggcggaggatcaggcggtggcggaagcggaggaggtggctccggaggaggagg |
| | | ttcccaagtgcagcttcaagaatcaggacccggacttgtgaagccatcagaaacc |
| | | ctctccctgacttgtaccgtgtccggtgtgagcctccccgactacggagtctctt |
| | | ggattcgccagcctccggggaagggtcttgaatggattggggtgatttggggatc |
| | | agagactacttactacaattcatcacttaagtcacgggtcaccatcagcaaagat |
| | | aatagcaagaaccaagtgtcacttaagctgtcatctgtgaccgccgctgacaccg |
| | | ccgtgtactattgtgccaaacattactattacggagggtcttatgctatggacta |
| | | ctggggacaggggaccctggtgactgtctctagccatcaccatcaccaccatcat |
| | | cac |
| 99789 | 935 | MALPVTALLLPLALLLHAARPeivmtqspatlslspgeratlscrasqdiskyln |
| CAR9- | | wyqqkpgqaprlliyhtsrlhsgiparfsgsgsgtdytltisslqpedfavyfcq |
| Soluble | | qgntlpytfgqgtkleikggggsggggsggggsggggsqvqlqesgpglvkpset |
| scFv-aa | | lsltctvsgvslpdygvswirqppgkglewigviwgsettyynsslksrvtiskd |
| | | nsknqvslklssvtaadtavyycakhyyyqgsyamdywgqqtlvtvsshhhhhhh |
| | | h |
| 105974 | 936 | atggccctccctgtcaccgccctgctgcttccgctggctcttctgctccacgccg |
| CAR 9- | | ctcggcccgaaattgtgatgacccagtcacccgccactcttagcctttcacccgg |
| Full-nt | | tgagcgcgcaaccctgtcttgcagagcctcccaagacatctcaaaataccttaat |
| | | tggtatcaacagaagcccggacaggctcctcgccttctgatctaccacaccagcc |
| | | ggctccattctggaatccctgccaggttcagcggtagcggatctgggaccgacta |
| | | caccctcactatcagctcactgcagccagaggacttcgctgtctatttctgtcag |
| | | caagggaacaccctgccctacacctttggacagggcaccaagctcgagattaaag |
| | | gtggaggtggcagcggaggaggtgggtccggcggtggaggaagcggaggcggtgg |
| | | gagccaggtccaactccaagaaagcggaccgggtcttgtgaagccatcagaaact |
| | | ctttcactgacttgtactgtgagcggagtgtctctccccgattacggggtgtctt |
| | | ggatcagacagccaccggggaagggtctggaatggattggagtgatttggggctc |
| | | tgagactacttactacaactcatccctcaagtcacgcgtcaccatctcaaaggac |
| | | aactctaagaatcaggtgtcactgaaactgtcatctgtgaccgcagccgacaccg |
| | | ccgtgtactattgcgctaagcattactattatggcgggagctacgcaatggatta |
| | | ctggggacagggtactctggtcaccgtgtccagcaccactaccccagcaccgagg |
| | | ccacccaccccggctcctaccatcgcctcccagcctctgtccctgcgtccggagg |
| | | catgtagacccgcagctggtggggccgtgcatacccggggtcttgacttcgcctg |
| | | cgatatctacatttgggcccctctggctggtacttgcggggtcctgctgctttca |
| | | ctcgtgatcactctttactgtaagcgcggtcggaagaagctgctgtacatcttta |
| | | agcaacccttcatgaggcctgtgcagactactcaagaggaggacggctgttcatg |
| | | ccggttcccagaggaggaggaaggcggctgcgaactgcgcgtgaaattcagccgc |
| | | agcgcagatgctccagcctacaagcaggggcagaaccagctctacaacgaactca |
| | | atcttggtcggagagaggagtacgacgtgctggacaagcggagaggacgggaccc |
| | | agaaatgggcgggaagccgcgcagaaagaatccccaagagggcctgtacaacgag |
| | | ctccaaaaggataagatggcagaagcctatagcgagattggtatgaaaggggaac |
| | | gcagaagaggcaaaggccacgacggactgtaccagggactcagcaccgccaccaa |
| | | ggacacctatgacgctcttcacatgcaggccctgccgcctcgg |
| 105974 | 937 | MALPVTALLLPLALLLHAARPeivmtqspatlslspqeratlscrasqdiskyln |
| CAR 9- | | wyqqkpgqaprlliyhtsrlhsgiparfsgsgsgtdytltisslqpedfavyfcq |
| Full-aa | | qgntlpytfgqqtkleikggggsggggsggggsggggsqvqlqesqpglvkpset |
| | | lsltctvsqvslpdygvswirqppqkglewigviwgsettyynsslksrvtiskd |
| | | nsknqvslklssvtaadtavyycakhyyyggsyamdywqqqtlvtvsstttpapr |
| | | pptpaptiasqplslrpeacrpaaggavhtrgldfacdiyiwaplagtcgvllls |
| | | lvitlyckrgrkkllyifkqpfmrpvqttqeedgcscrfpeeeeggcelrvkfsr |
| | | sadapaykqgqnqlynelnlgrreeydvldkrrgrdpemggkprrknpqeglyne |
| | | lqkdkmaeayseigmkgerrrgkghdglyqglstatkdtydalhmqalppr |

CAR10

| | | |
|---|---|---|
| CAR10 | 938 | qvqlqesgpglvkpsetlsltctvsgvslpdygvswirqppgkglewigviwgse |
| scFv | | ttyynsslksrvtiskdnsknqvslklssvtaadtavyycakhyyyggsyamdyw |
| domain | | gqgtlvtvssggggsggggsggggsggggseivmtqspatlslspgeratlscra |
| | | sqdiskylnwyqqkpgqaprlliyhtsrlhsgiparfsgsgsgtdytltisslqp |
| | | edfavyfcqqgntlpytfgqgtkleik |
| 100796 | 939 | atggcactgcctgtcactgccctcctgctgcctctggccctccttctgcatgccg |
| CAR10- | | ccaggccccaagtccagctgcaagagtcaggacccggactggtgaagccgtctga |
| Soluble | | gactctctcactgacttgtaccgtcagcggcgtgtccctccccgactacggagtg |
| scFv-nt | | tcatggatccgccaacctcccgggaaagggcttgaatggattggtgtcatctggg |
| | | gttctgaaaccacctactacaactcttccctgaagtccagggtgaccatcagcaa |
| | | ggataattccaagaaccaggtcagccttaagctgtcatctgtgaccgctgctgac |
| | | accgccgtgtattactgcgccaagcactactattacggaggaagctacgctatgg |
| | | actattggggacagggcactctcgtgactgtgagcagcggcggtggagggtctgg |
| | | aggtggaggatccggtggtggtgggtcaggcggaggagggagcgagattgtgatg |
| | | actcagtcaccagccaccctttctctttcacccggcgagagagcaaccctgagct |
| | | gtagagccagccaggacatttctaagtacctcaactggtatcagcaaaaaccggg |
| | | gcaggcccctcgcctcctgatctaccatacctcacgccttcactctggtatcccc |
| | | gctcggtttagcggatcaggatctggtaccgactacactctgaccatttccagcc |
| | | tgcagccagaagatttcgcagtgtatttctgccagcagggcaatacccttcctta |
| | | caccttcggtcagggaaccaagctcgaaatcaagcaccatcaccatcatcaccac |
| | | cat |
| 100796 | 940 | MALPVTALLLPLALLLHAARPqvqlqesqpglvkpsetlsltctvsgvslpdygv |
| CAR10- | | swirqppgkglewigviwgsettyynsslksrvtiskdnsknqvslklssvtaad |
| Soluble | | tavyycakhyyyggsyamdywgqgtlvtvssggggsggggsggggsggggseivm |
| scFv-aa | | tqspatlslspgeratlscrasqdiskylnwyqqkpgqaprlliyhtsrlhsgip |
| | | arfsgsgsgtdytltisslqpedfavyfcqqgntlpytfgqgtkleikhhhhhhh |
| | | h |
| 105975 | 941 | atggccctccctgtcaccgccctgctgcttccgctggctcttctgctccacgccg |
| CAR 10 | | ctcggcccgaaattgtgatgacccagtcacccgccactcttagcctttcacccgg |
| Full-nt | | tgagcgcgcaaccctgtcttgcagagcctcccaagacatctcaaaataccttaat |
| | | tggtatcaacagaagcccggacaggctcctcgccttctgatctaccacaccagcc |
| | | ggctccattctggaatccctgccaggttcagcggtagcggatctgggaccgacta |
| | | caccctcactatcagctcactgcagccagaggacttcgctgtctatttctgtcag |
| | | caagggaacaccctgccctacacctttggacagggcaccaagctcgagattaaag |
| | | gtggaggtggcagcggaggaggtgggtccggcggtggaggaagcggaggcggtgg |
| | | gagccaggtccaactccaagaaagcggaccgggtcttgtgaagccatcagaaact |
| | | ctttcactgacttgtactgtgagcggagtgtctctccccgattacggggtgtctt |
| | | ggatcagacagccaccggggaagggtctggaatggattggagtgatttggggctc |
| | | tgagactacttactacaactcatccctcaagtcacgcgtcaccatctcaaaggac |
| | | aactctaagaatcaggtgtcactgaaactgtcatctgtgaccgcagccgacaccg |
| | | ccgtgtactattgcgctaagcattactattatggcgggagctacgcaatggatta |
| | | ctggggacagggtactctggtcaccgtgtccagcaccactaccccagcaccgagg |
| | | ccacccaccccggctcctaccatcgcctcccagcctctgtccctgcgtccggagg |
| | | catgtagacccgcagctggtggggccgtgcatacccggggtcttgacttcgcctg |
| | | cgatatctacatttgggcccctctggctggtacttgcggggtcctgctgctttca |
| | | ctcgtgatcactctttactgtaagcgcggtcggaagaagctgctgtacatcttta |
| | | agcaacccttcatgaggcctgtgcagactactcaagaggaggacggctgttcatg |
| | | ccggttcccagaggaggaggaaggcggctgcgaactgcgcgtgaaattcagccgc |
| | | agcgcagatgctccagcctacaagcaggggcagaaccagctctacaacgaactca |
| | | atcttggtcggagagaggagtacgacgtgctggacaagcggagaggacgggaccc |
| | | agaaatgggcgggaagccgcgcagaaagaatccccaagagggcctgtacaacgag |
| | | ctccaaaaggataagatggcagaagcctatagcgagattggtatgaaaggggaac |
| | | gcagaagaggcaaaggccacgacggactgtaccagggactcagcaccgccaccaa |
| | | ggacacctatgacgctcttcacatgcaggccctgccgcctcgg |
| 105975 | 942 | MALPVTALLLPLALLLHAARPEIVMTQSPATLSLSPGERATLSCRASQDISKYLN |
| CAR 10 | | WYQQKPGQAPRLLIYHTSRLHSGIPARFSGSGSGTDYTLTISSLQPEDFAVYFCQ |
| Full-aa | | QGNTLPYTFGQGTKLEIKGGGGSGGGGSGGGGSGGGGSQVQLQESGPGLVKPSET |
| | | LSLTCTVSGVSLPDYGVSWIRQPPGKGLEWIGVIWGSETTYYNSSLKSRVTISKD |
| | | NSKNQVSLKLSSVTAADTAVYYCAKHYYYGGSYAMDYWGQGTLVTVSSTTTPAPR |
| | | PPTPAPTIASQPLSLRPEACRPAAGGAVHTRGLDFACDIYIWAPLAGTCGVLLLS |
| | | LVITLYCKRGRKKLLYIFKQPFMRPVQTTQEEDGCSCRFPEEEEGGCELRVKFSR |
| | | SADAPAYKQGQNQLYNELNLGRREEYDVLDKRRGRDPEMGGKPRRKNPQEGLYNE |
| | | LQKDKMAEAYSEIGMKGERRRGKGHDGLYQGLSTATKDTYDALHMQALPPR |

CAR11

| | | |
|---|---|---|
| CAR11 | 943 | eivmtqspatlslspgeratlscrasqdiskylnwyqqkpgqaprlliyhtsrlh |
| scFv | | sgiparfsgsgsgtdytltisslqpedfavyfcqqgntlpytfgqgtkleikggg |
| domain | | gsggggsggggsqvqlqesgpglvkpsetlsltctvsgvslpdygvswirqppgk |
| | | glewigviwgsettyynsslksrvtiskdnsknqvslklssvtaadtavyycakh |
| | | yyyggsyamdywgqgtlvtvss |
| 103101 | 944 | Atggccctccctgtcaccgccctgctgcttccgctggctcttctgctccacgccg |
| CAR11- | | ctcggcccgaaattgtgatgacccagtcacccgccactcttagcctttcacccgg |
| Soluble | | tgagcgcgcaaccctgtcttgcagagcctcccaagacatctcaaaataccttaat |
| scFv-nt | | tggtatcaacagaagcccggacaggctcctcgccttctgatctaccacaccagcc |
| | | ggctccattctggaatccctgccaggttcagcggtagcggatctgggaccgacta |
| | | caccctcactatcagctcactgcagccagaggacttcgctgtctatttctgtcag |
| | | caagggaacaccctgccctacacctttggacagggcaccaagctcgagattaaag |
| | | gtggaggtggcagcggaggaggtgggtccggcggtggaggaagccaggtccaact |
| | | ccaagaaagcggaccgggtcttgtgaagccatcagaaactctttcactgacttgt |
| | | actgtgagcggagtgtctctccccgattacggggtgtcttggatcagacagccac |
| | | cggggaagggtctggaatggattggagtgatttggggctctgagactacttacta |
| | | caattcatccctcaagtcacgcgtcaccatctcaaaggacaactctaagaatcag |
| | | gtgtcactgaaactgtcatctgtgaccgcagccgacaccgccgtgtactattgcg |
| | | ctaagcattactattatggcgggagctacgcaatggattactggggacagggtac |
| | | tctggtcaccgtgtccagccaccaccatcatcaccatcaccat |
| 103101 | 945 | MALPVTALLLPLALLLHAARPeivmtqspatlslspgeratlscrasqdiskyln |
| CAR11- | | wyqqkpgqaprlliyhtsrlhsgiparfsgsgsgtdytltisslqpedfavyfcq |
| Soluble | | qgntlpytfgqgtkleikggggsggggsggggsqvqlqesgpglvkpsetlsltc |
| scFv-aa | | tvsgvslpdygvswirqppgkglewigviwgsettyynsslksrvtiskdnsknq |
| | | vslklssvtaadtavyycakhyyyggsyamdywgqqtlvtvsshhhhhhhh |
| 105976 | 946 | atggctctgcccgtgaccgcactcctcctgccactggctctgctgcttcacgccg |
| CAR 11 | | ctcgcccacaagtccagcttcaagaatcagggcctggtctggtgaagccatctga |
| Full-nt | | gactctgtccctcacttgcaccgtgagcggagtgtccctcccagactacggagtg |
| | | agctggattagacagcctcccggaaagggactggagtggatcggagtgatttggg |
| | | gtagcgaaaccacttactataactcttccctgaagtcacgggtcaccatttcaaa |
| | | ggataactcaaagaatcaagtgagcctcaagctctcatcagtcaccgccgctgac |
| | | accgccgtgtattactgtgccaagcattactactatggagggtcctacgccatgg |
| | | actactggggccagggaactctggtcactgtgtcatctggtggaggaggtagcgg |
| | | aggaggcgggagcggtggaggtggctccggaggtggcggaagcgaaatcgtgatg |
| | | acccagagccctgcaaccctgtccctttctcccggggaacgggctaccctttctt |
| | | gtcgggcatcacaagatatctcaaaatacctcaattggtatcaacagaagccggg |
| | | acaggcccctaggcttcttatctaccacacctctcgcctgcatagcgggattccc |
| | | gcacgctttagcgggtctggaagcgggaccgactacactctgaccatctcatctc |
| | | tccagcccgaggacttcgccgtctacttctgccagcagggtaacaccctgccgta |
| | | caccttcggccagggcaccaagcttgagatcaaaaccactactcccgctccaagg |
| | | ccacccacccctgccccgaccatcgcctctcagccgctttccctgcgtccggagg |
| | | catgtagacccgcagctggtggggccgtgcatacccggggtcttgacttcgcctg |
| | | cgatatctacatttgggcccctctggctggtacttgcggggtcctgctgctttca |
| | | ctcgtgatcactctttactgtaagcgcggtcggaagaagctgctgtacatcttta |
| | | agcaacccttcatgaggcctgtgcagactactcaagaggaggacggctgttcatg |
| | | ccggttcccagaggaggaggaaggcggctgcgaactgcgcgtgaaattcagccgc |
| | | agcgcagatgctccagcctacaagcaggggcagaaccagctctacaacgaactca |
| | | atcttggtcggagagaggagtacgacgtgctggacaagcggagaggacgggaccc |
| | | agaaatgggcgggaagccgcgcagaaagaatccccaagagggcctgtacaacgag |
| | | ctccaaaaggataagatggcagaagcctatagcgagattggtatgaaaggggaac |
| | | gcagaagaggcaaaggccacgacggactgtaccagggactcagcaccgccaccaa |
| | | ggacacctatgacgctcttcacatgcaggccctgccgcctcgg |
| 105976 | 947 | MALPVTALLLPLALLLHAARPQVQLQESGPGLVKPSETLSLTCTVSGVSLPDYGV |
| CAR 11 | | SWIRQPPGKGLEWIGVIWGSETTYYNSSLKSRVTISKDNSKNQVSLKLSSVTAAD |
| Full-aa | | TAVYYCAKHYYYGGSYAMDYWGQGTLVTVSSGGGGSGGGGSGGGGSGGGGSEIVM |
| | | TQSPATLSLSPGERATLSCRASQDISKYLNWYQQKPGQAPRLLIYHTSRLHSGIP |
| | | ARFSGSGSGTDYTLTISSLQPEDFAVYFCQQGNTLPYTFGQGTKLEIKTTTPAPR |
| | | PPTPAPTIASQPLSLRPEACRPAAGGAVHTRGLDFACDIYIWAPLAGTCGVLLLS |
| | | LVITLYCKRGRKKLLYIFKQPFMRPVQTTQEEDGCSCRFPEEEEGGCELRVKFSR |
| | | SADAPAYKQGQNQLYNELNLGRREEYDVLDKRRGRDPEMGGKPRRKNPQEGLYNE |
| | | LQKDKMAEAYSEIGMKGERRRGKGHDGLYQGLSTATKDTYDALHMQALPPR |

CAR12

| | | |
|---|---|---|
| CAR12 | 948 | qvqlqesgpglvkpsetlsltctvsgvslpdygvswirqppgkglewigviwgse |
| scFv | | ttyynsslksrvtiskdnsknqvslklssvtaadtavyycakhyyyggsyamdyw |
| domain | | gqgtlvtvssggggsggggsggggseivmtqspatlslspgeratlscrasqdis |
| | | kylnwyqqkpgqaprlliyhtsrlhsgiparfsgsgsgtdytltisslqpedfav |
| | | yfcqqgntlpytfgqgtkleik |
| 103104 | 949 | atggctctgcccgtgaccgcactcctcctgccactggctctgctgcttcacgccg |
| CAR12- | | ctcgcccacaagtccagcttcaagaatcagggcctggtctggtgaagccatctga |
| Soluble | | gactctgtccctcacttgcaccgtgagcggagtgtccctcccagactacggagtg |
| scFv-nt | | agctggattagacagcctcccggaaagggactggagtggatcggagtgatttggg |
| | | gtagcgaaaccacttactataactcttccctgaagtcacgggtcaccatttcaaa |
| | | ggataactcaaagaatcaagtgagcctcaagctctcatcagtcaccgccgctgac |
| | | accgccgtgtattactgtgccaagcattactactatggagggtcctacgccatgg |
| | | actactggggccagggaactctggtcactgtgtcatctggtggaggaggtagcgg |
| | | aggaggcgggagcggtggaggtggctccgaaatcgtgatgacccagagccctgca |
| | | accctgtccctttctcccggggaacgggctaccctttcttgtcgggcatcacaag |
| | | atatctcaaaatacctcaattggtatcaacagaagccgggacaggcccctaggct |
| | | tcttatctaccacacctctcgcctgcatagcgggattcccgcacgctttagcggg |
| | | tctggaagcgggaccgactacactctgaccatctcatctctccagcccgaggact |
| | | tcgccgtctacttctgccagcagggtaacaccctgccgtacaccttcggccaggg |
| | | caccaagcttgagatcaaacatcaccaccatcatcaccatcac |
| 103104 | 950 | MALPVTALLLPLALLLHAARPqvqlqesqpglvkpsetlsltctvsgvslpdygv |
| CAR12- | | swirqppgkglewigviwgsettyynsslksrvtiskdnsknqvslklssvtaad |
| Soluble | | tavyycakhyyyggsyamdywgqgtlvtvssggggsggggsggggseivmtqspa |
| scFv-aa | | tlslspgeratlscrasqdiskylnwyqqkpgqaprlliyhtsrlhsgiparfsg |
| | | sgsgtdytltisslqpedfavyfcqqgntlpytfgqgtkleikhhhhhhhh |
| 105977 | 951 | atggccctccctgtcaccgccctgctgcttccgctggctcttctgctccacgccg |
| CAR 12- | | ctcggcccgaaattgtgatgacccagtcacccgccactcttagcctttcacccgg |
| Full-nt | | tgagcgcgcaaccctgtcttgcagagcctcccaagacatctcaaaataccttaat |
| | | tggtatcaacagaagcccggacaggctcctcgccttctgatctaccacaccagcc |
| | | ggctccattctggaatccctgccaggttcagcggtagcggatctgggaccgacta |
| | | caccctcactatcagctcactgcagccagaggacttcgctgtctatttctgtcag |
| | | caagggaacaccctgccctacacctttggacagggcaccaagctcgagattaaag |
| | | gtggaggtggcagcggaggaggtgggtccggcggtggaggaagccaggtccaact |
| | | ccaagaaagcggaccgggtcttgtgaagccatcagaaactctttcactgacttgt |
| | | actgtgagcggagtgtctctccccgattacggggtgtcttggatcagacagccac |
| | | cggggaagggtctggaatggattggagtgatttggggctctgagactacttacta |
| | | caactcatccctcaagtcacgcgtcaccatctcaaaggacaactctaagaatcag |
| | | gtgtcactgaaactgtcatctgtgaccgcagccgacaccgccgtgtactattgcg |
| | | ctaagcattactattatggcgggagctacgcaatggattactggggacagggtac |
| | | tctggtcaccgtgtccagcaccactaccccagcaccgaggccacccaccccggct |
| | | cctaccatcgcctcccagcctctgtccctgcgtccggaggcatgtagacccgcag |
| | | ctggtggggccgtgcatacccggggtcttgacttcgcctgcgatatctacatttg |
| | | ggcccctctggctggtacttgcggggtcctgctgctttcactcgtgatcactctt |
| | | tactgtaagcgcggtcggaagaagctgctgtacatctttaagcaacccttcatga |
| | | ggcctgtgcagactactcaagaggaggacggctgttcatgccggttcccagagga |
| | | ggaggaaggcggctgcgaactgcgcgtgaaattcagccgcagcgcagatgctcca |
| | | gcctacaagcaggggcagaaccagctctacaacgaactcaatcttggtcggagag |
| | | aggagtacgacgtgctggacaagcggagaggacgggacccagaaatgggcgggaa |
| | | gccgcgcagaaagaatccccaagagggcctgtacaacgagctccaaaaggataag |
| | | atggcagaagcctatagcgagattggtatgaaaggggaacgcagaagaggcaaag |
| | | gccacgacggactgtaccagggactcagcaccgccaccaaggacacctatgacgc |
| | | tcttcacatgcaggccctgccgcctcgg |
| 105977 | 952 | MALPVTALLLPLALLLHAARPEIVMTQSPATLSLSPGERATLSCRASQDISKYLN |
| CAR 12- | | WYQQKPGQAPRLLIYHTSRLHSGIPARFSGSGSGTDYTLTISSLQPEDFAVYFCQ |
| Full-aa | | QGNTLPYTFGQGTKLEIKGGGGSGGGGSGGGGSQVQLQESGPGLVKPSETLSLTC |
| | | TVSGVSLPDYGVSWIRQPPGKGLEWIGVIWGSETTYYNSSLKSRVTISKDNSKNQ |
| | | VSLKLSSVTAADTAVYYCAKHYYYGGSYAMDYWGQGTLVTVSSTTTPAPRPPTPA |
| | | PTIASQPLSLRPEACRPAAGGAVHTRGLDFACDIYIWAPLAGTCGVLLLSLVITL |
| | | YCKRGRKKLLYIFKQPFMRPVQTTQEEDGCSCRFPEEEEGGCELRVKFSRSADAP |
| | | AYKQGQNQLYNELNLGRREEYDVLDKRRGRDPEMGGKPRRKNPQEGLYNELQKDK |
| | | [sequence omitted] |

CTL019

| | | |
|---|---|---|
| CTL019- | 953 | atggccctgcccgtcaccgctctgctgctgccccttgctctgcttcttcatgcag |
| Soluble | | caaggccggacatccagatgacccaaaccacctcatccctctctgcctctcttgg |
| scFv-Histag- | | agacagggtgaccatttcttgtcgcgccagccaggacatcagcaagtatctgaac |
| nt | | tggtatcagcagaagccggacggaaccgtgaagctcctgatctaccatacctctc |
| | | gcctgcatagcggcgtgccctcacgcttctctggaagcggatcaggaaccgatta |
| | | ttctctcactatttcaaatcttgagcaggaagatattgccacctatttctgccag |
| | | cagggtaataccctgccctacaccttcggaggagggaccaagctcgaaatcaccg |
| | | gtggaggaggcagcggcggtggagggtctggtggaggtggttctgaggtgaagct |
| | | gcaagaatcaggccctggacttgtggccccttcacagtccctgagcgtgacttgc |
| | | accgtgtccggagtctccctgcccgactacggagtgtcatggatcagacaacctc |
| | | cacggaaaggactggaatggctcggtgtcatctggggtagcgaaactacttacta |
| | | caattcagccctcaaaagcaggctgactattatcaaggacaacagcaagtcccaa |
| | | gtctttcttaagatgaactcactccagactgacgacaccgcaatctactattgtg |
| | | ctaagcactactactacggaggatcctacgctatggattactggggacaaggtac |
| | | ttccgtcactgtctcttcacaccatcatcaccatcaccatcac |
| CTL019- | 954 | MALPVTALLLPLALLLHAARPdiqmtqttsslsaslgdrvtiscrasqdiskyln |
| Soluble | | wyqqkpdgtvklliyhtsrlhsgvpsrfsgsgsgtdysltisnleqediatyfcq |
| scFv-Histag- | | qgntlpytfgggtkleitggggsggggsggggsevklqesgpglvapsqslsvtc |
| aa | | tvsgvslpdygvswirqpprkglewlgviwgsettyynsalksrltiikdnsksq |
| | | vflkmnslqtddtaiyycakhyyyqgsyamdywgqqtsvtvsshhhhhhhh |
| CTL019 | 955 | atggccttaccagtgaccgccttgctcctgccgctggccttgctgctccacgccg |
| Full-nt | | ccaggccggacatccagatgacacagactacatcctccctgtctgcctctctggg |
| | | agacagagtcaccatcagttgcagggcaagtcaggacattagtaaatatttaaat |
| | | tggtatcagcagaaaccagatggaactgttaaactcctgatctaccatacatcaa |
| | | gattacactcaggagtcccatcaaggttcagtggcagtgggtctggaacagatta |
| | | ttctctcaccattagcaacctggagcaagaagatattgccacttacttttgccaa |
| | | cagggtaatacgcttccgtacacgttcggaggggggaccaagctggagatcacag |
| | | gtggcggtggctcgggcggtggtgggtcgggtggcggcggatctgaggtgaaact |
| | | gcaggagtcaggacctggcctggtggcgccctcacagagcctgtccgtcacatgc |
| | | actgtctcaggggtctcattacccgactatggtgtaagctggattcgccagcctc |
| | | cacgaaagggtctggagtggctgggagtaatatggggtagtgaaaccacatacta |
| | | taattcagctctcaaatccagactgaccatcatcaaggacaactccaagagccaa |
| | | gttttcttaaaaatgaacagtctgcaaactgatgacacagccatttactactgtg |
| | | ccaaacattattactacggtggtagctatgctatggactactggggccaaggaac |
| | | ctcagtcaccgtctcctcaaccacgacgccagcgccgcgaccaccaacaccggcg |
| | | cccaccatcgcgtcgcagcccctgtccctgcgcccagaggcgtgccggccagcgg |
| | | cggggggcgcagtgcacacgagggggctggacttcgcctgtgatatctacatctg |
| | | ggcgcccttggccgggacttgtggggtccttctcctgtcactggttatcaccctt |
| | | tactgcaaacggggcagaaagaaactcctgtatatattcaaacaaccatttatga |
| | | gaccagtacaaactactcaagaggaagatggctgtagctgccgatttccagaaga |
| | | agaagaaggaggatgtgaactgagagtgaagttcagcaggagcgcagacgccccc |
| | | gcgtacaagcagggccagaaccagctctataacgagctcaatctaggacgaagag |
| | | aggagtacgatgttttggacaagagacgtggccgggaccctgagatggggggaaa |
| | | gccgagaaggaagaaccctcaggaaggcctgtacaatgaactgcagaaagataag |
| | | atggcggaggcctacagtgagattgggatgaaaggcgagcgccggaggggcaagg |
| | | ggcacgatggcctttaccagggtctcagtacagccaccaaggacacctacgacgc |
| | | ccttcacatgcaggccctgccccctcgc |
| CTL019 | 956 | MALPVTALLLPLALLLHAARPdiqmtqttsslsaslgdrvtiscrasqdiskyln |
| Full-aa | | wyqqkpdgtvklliyhtsrlhsgvpsrfsgsgsgtdysltisnleqediatyfcq |
| | | qgntlpytfgggtkleitggggsggggsggggsevklqesgpglvapsqslsvtc |
| | | tvsgvslpdygvswirqpprkglewlgviwgsettyynsalksrltiikdnsksq |
| | | vflkmnslqtddtaiyycakhyyyggsyamdywgqgtsvtvsstttpaprpptpa |
| | | ptiasqplslrpeacrpaaggavhtrgldfacdiyiwaplagtcgvlllslvitl |
| | | yckrgrkkllyifkqpfmrpvqttqeedgcscrfpeeeeggcelrvkfsrsadap |
| | | aykqgqnqlynelnlgrreeydvldkrrgrdpemggkprrknpqeglynelqkdk |
| | | [sequence omitted] |
| CTL019 | 957 | diqmtqttsslsaslgdrvtiscrasqdiskylnwyqqkpdgtvklliyhtsrlh |
| scFv | | sgvpsrfsgsgsgtdysltisnleqediatyfcqqgntlpytfgggtkleitggg |
| domain | | gsggggsggggsevklqesgpglvapsqslsvtctvsgvslpdygvswirqpprk |
| | | glewlgviwgsettyynsalksrltiikdnsksqvflkmnslqtddtaiyycakh |
| | | yyyggsyamdywgqgtsvtvss |
| mCAR1 | 417 | QVQLLESGAELVRPGSSVKISCKASGYAFSSYWMNWVKQRPGQGLEWIGQIYPGD |
| scFv | | GDTNYNGKFKGQATLTADKSSSTAYMQLSGLTSEDSAVYSCARKTISSVVDFYFD |
| | | YWGQGTTVTGGGSGGGSGGGSGGGSELVLTQSPKFMSTSVGDRVSVTCKASQNVG |
| | | TNVAWYQQKPGQSPKPLIYSATYRNSGVPDRFTGSGSGTDFTLTITNVQSKDLAD |
| | | YFCQYNRYPYTSFFFTKLEIKRRS |
| mCAR1 | 1937 | QVQLLESGAELVRPGSSVKISCKASGYAFSSYWMNWVKQRPGQGLEWIGQIYPGD |
| Full-aa | | GDTNYNGKFKGQATLTADKSSSTAYMQLSGLTSEDSAVYSCARKTISSVVDFYFD |
| | | YWGQGTTVTGGGSGGGSGGGSGGGSELVLTQSPKFMSTSVGDRVSVTCKASQNVG |
| | | TNVAWYQQKPGQSPKPLIYSATYRNSGVPDRFTGSGSGTDFTLTITNVQSKDLAD |
| | | YFCQYNRYPYTSFFFTKLEIKRRSKIEVMYPPPYLDNEKSNGTIIHVKGKHLCPS |
| | | PLFPGPSKPFWVLVVVGGVLACYSLLVTVAFIIFWVRSKRSRLLHSDYMNMTPRR |
| | | PGPTRKHYQPYAPPRDFAAYRSRVKFSRSADAPAYQQGQNQLYNELNLGRREEYD |
| | | VLDKRRGRDPEMGGKPRRKNPQEGLYNELQKDKMAEAYSEIGMKGERRRGKGHDG |
| | | LYQGLSTATKDTYDALHMQALPPR |
| mCAR2 | 423 | DIQMTQTTSSLSASLGDRVTISCRASQDISKYLNWYQQKPDGTVKLLIYHTSRLH |
| scFv | | SGVPSRFSGSGSGTDYSLTISNLEQEDIATYFCQQGNTLPYTFGGGTKLEITGST |
| | | SGSGKPGSGEGSTKGEVKLQESGPGLVAPSQSLSVTCTVSGVSLPDYGVSWIRQP |
| | | PRKGLEWLGVIWGSETTYYNSALKSRLTIIKDNSKSQVFLKMNSLQTDDTAIYYC |
| | | AKHYYYGGSYAMDYWGQGTSVTVSSE |
| mCAR2 | 1938 | DIQMTQTTSSLSASLGDRVTISCRASQDISKYLNWYQQKPDGTVKLLIYHTSRLH |
| CAR-aa | | SGVPSRFSGSGSGTDYSLTISNLEQEDIATYFCQQGNTLPYTFGGGTKLEITGST |
| | | SGSGKPGSGEGSTKGEVKLQESGPGLVAPSQSLSVTCTVSGVSLPDYGVSWIRQP |
| | | PRKGLEWLGVIWGSETTYYNSALKSRLTIIKDNSKSQVFLKMNSLQTDDTAIY |
| | | YCAKHYYYGGSYAMDYWGQGTSVTVSSESKYGPPCPPCPMFWVLVVVGGVLACYS |
| | | LLVTVAFIIFWVKRGRKKLLYIFKQPFMRPVQTTQEEDGCSCRFEEEEGGCELRV |
| | | KFSRSADAPAYQQGQNQLYNELNLGRREEYDVLDKRRGRDPEMGGKPRRKNPQEG |
| | | LYNELQKDKMAEAYSEIGMKGERRRGKGHDGLYQGLSTATKDTYDALHMQALPPR |
| | | L |
| mCAR2 | 1939 | DIQMTQTT SSLSASLGDR VTISCRASQD ISKYLNWYQQ KPDGTVKLLI |
| Full-aa | | YHTSRLHSGV PSRFSGSGSG TDYSLTISNL EQEDIATYFC QQGNTLPYTF |
| | | GGGTKLEITG STSGSGKPGS GEGSTKGEVK LQESGPGLVA PSQSLSVTCT |
| | | VSGVSLPDYG VSWIRQPPRK GLEWLGVIWG SETTYYNSAL KSRLTIIKDN |
| | | SKSQVFLKMN SLQTDDTAIY YCAKHYYYGG SYAMDYWGQG TSVTVSSESK |
| | | YGPPCPPCPM FWVLVVVGGV LACYSLLVTV |
| | | AFIIFWVKRG RKKLLYIFKQ PFMRPVQTTQ EEDGCSCRFE EEEGGCELRV |
| | | KFSRSADAPA YQQGQNQLYN ELNLGRREEY DVLDKRRGRD PEMGGKPRRK |
| | | NPQEGLYNEL QKDKMAEAYS EIGMKGERRR GKGHDGLYQG LSTATKDTYD |
| | | ALHMQALPPR LEGGGEGRGS LLTCGDVEEN PGPRMLLLVT SLLLCELPHP |
| | | AFLLIPRKVC NGIGIGEFKD SLSINATNIK HFKNCTSISG DLHILPVAFR |
| | | GDSFTHTPPL DPQELDILKT VKEITGFLLI QAWPENRTDL HAFENLEIIR |
| | | GRTKQHGQFS LAVVSLNITS LGLRSLKEIS DGDVIISGNK NLCYANTINW |
| | | KKLFGTSGQK TKIISNRGEN SCKATGQVCH ALCSPEGCWG PEPRDCVSCR |
| | | NVSRGRECVD KCNLLEGEPR EFVENSECIQ CHPECLPQAM NITCTGRGPD |
| | | NCIQCAHYID GPHCVKTCPA GVMGENNTLV WKYADAGHVC HLCHPNCTYG |
| | | CTGPGLEGCP TNGPKIPSIA TGMVGALLLL LVVALGIGLF M |
| mCAR3 | 411 | DIQMTQTTSSLSASLGDRVTISCRASQDISKYLNWYQQKPDGTVKLLIYHTSRLH |
| scFv | | SGVPSRFSGSGSGTDYSLTISNLEQEDIATYFCQQGNTLPYTFGGGTKLEITGST |
| | | SGSGKPGSGEGSTKGEVKLQESGPGLVAPSQSLSVTCTVSGVSLPDYGVSWIRQP |
| | | PRKGLEWLGVIWGSETTYYNSALKSRLTIIKDNSKSQVFLKMNSLQTDDTAIYYC |
| | | AKHYYYGGSYAMDYWGQGTSVTVSS |
| mCAR3 | 1940 | DIQMTQTTSSLSASLGDRVTISCRASQDISKYLNWYQQKPDGTVKLLIYHTSRLH |
| Full-aa | | SGVPSRFSGSGSGTDYSLTISNLEQEDIATYFCQQGNTLPYTFGGGTKLEITGST |
| | | SGSGKPGSGEGSTKGEVKLQESGPGLVAPSQSLSVTCTVSGVSLPDYGVSWIRQP |
| | | PRKGLEWLGVIWGSETTYYNSALKSRLTIIKDNSKSQVFLKMNSLQTDDTAIYYC |
| | | AKHYYYGGSYAMDYWGQGTSVTVSSAAAIEVMYPPPYLDNEKSNGTIIHVKGKHL |
| | | CPSPLFPGPSKPFWVLVVVGGVLACYSLLVTVAFIIFWVRSKRSRLLHSDYMNMT |
| | | PRRPGPTRKHYQPYAPPRDFAAYRSRVKFSRSADAPAYQQGQNQLYNELNLGRRE |
| | | EYDVLDKRRGRDPEMGGKPRRKNPQEGLYNELQKDKMAEAYSEIGMKGERRRGKG |
| | | HDGLYQGLSTATKDTYDALHMQALPPR |
| SSJ25-C1 | 416 | QVQLLESGAELVRPGSSVKISCKASGYAFSSYWMNWVKQRPGQGLEWIGQIYPGD |
| VH | | GDTNYNGKFKGQATLTADKSSSTAYMQLSGLTSEDSAVYSCARKTISSVVDFYFD |
| sequence | | YWGQGTTVT |
| SSJ25-C1 | 1941 | ELVLTQSPKFMSTSVGDRVSVTCKASQNVGTNVAWYQQKPGQSPKPLIYSATYRN |
| VL | | SGVPDRFTGSGSGTDFTLTITNVQSKDLADYFYFCQYNRYPYTSGGGTKLEIKRR |
| sequence | | S |

[0703] In some embodiments, the CD19 CAR or binding domain includes the amino acid sequence of CTL019, or is encoded by the nucleotide sequence of CTL019 according to Table 5 with or without the leader sequence or the his tag, or a sequence substantially identical thereto (e.g., at least 85%, 90%, 95% or higher identity).

[0704] In some embodiments, the CDRs are defined according to the Kabat numbering scheme, the Chothia numbering scheme, or a combination thereof.

[0705] The sequences of humanized CDR sequences of the scFv domains are shown in Table 6A for the heavy chain variable domains and in Table 6B for the light chain variable domains. “ID” stands for the respective SEQ ID NO for each CDR.

TABLE 6A
Heavy Chain Variable Domain CDRs (according to Kabat)

| | | | SEQ | | SEQ | | SEQ |
|---|---|---|---|---|---|---|---|
| | | | ID | | ID | | ID |
| Candidate | FW | HCDR1 | NO | HCDR2 | NO | HCDR3 | NO |
| murine_CART19 | | DYGVS | 958 | VIWGSETTYYNSALKS | 959 | HYYYGGSYAMDY | 960 |
| humanized_CART19 a | VH4 | DYGVS | 958 | VIWGSETTYY [symbol] S [symbol] LKS | 961 | HYYYGGSYAMDY | 960 |
| humanized_CART19 b | VH4 | DYGVS | 958 | VIWGSETTYY [symbol] S [symbol] LKS | 962 | HYYYGGSYAMDY | 960 |
| humanized_CART19 c | VH4 | DYGVS | 958 | VIWGSETTYYNS [symbol] LKS | 963 | HYYYGGSYAMDY | 960 |

TABLE 6B
Light Chain Variable Domain CDRs (according to Kabat)

| | | | SEQ | | SEQ | | SEQ |
|---|---|---|---|---|---|---|---|
| | | | ID | | ID | | ID |
| Candidate | FW | LCDR1 | NO | LCDR2 | NO | LCDR3 | NO |
| murine_CART19 | | RASQDISKYLN | 964 | HTSRLHS | 965 | QQGNTLPYT | 966 |
| humanized_CART19 a | VK3 | RASQDISKYLN | 964 | HTSRLHS | 965 | QQGNTLPYT | 966 |
| humanized_CART19 b | VK3 | RASQDISKYLN | 964 | HTSRLHS | 965 | QQGNTLPYT | 966 |
| humanized_CART19 c | VK3 | RASQDISKYLN | 964 | HTSRLHS | 965 | QQGNTLPYT | 966 |

[0706] In one embodiment, the CAR molecule comprises a BCMA CAR molecule described herein, e.g., a BCMA CAR described in US-2016-0046724-A1 or WO2016/014565. In embodiments, the BCMA CAR comprises an amino acid, or has a nucleotide sequence of a CAR molecule, or an antigen binding domain according to US-2016-0046724-A1, or Table 1 or 16, SEQ ID NO: 271 or SEQ ID NO: 273 of WO2016/014565, incorporated herein by reference, or a sequence substantially identical to any of the aforesaid sequences (e.g., at least 85%, 90%, 95% or more identical to any of the aforesaid BCMA CAR sequences). The amino acid and nucleotide sequences encoding the BCMA CAR molecules and antigen binding domains (e.g., including one, two, three VH CDRs; and one, two, three VL CDRs according to Kabat or Chothia), are specified in WO2016/014565.

[0707] In embodiments, the BCMA CAR comprises an anti-BCMA binding domain (e.g., human or humanized anti-BCMA binding domain), a transmembrane domain, and an intracellular signaling domain, and wherein said anti-BCMA binding domain comprises a heavy chain complementary determining region 1 (HC CDR1), a heavy chain complementary determining region 2 (HC CDR2), and a heavy chain complementary determining region 3 (HC CDR3) of any anti-BMCA heavy chain binding domain amino acid sequences listed in Table 7 or 8, or a sequence at least 85%, 90%, 95% or more identical thereto (e.g., having less than 5, 4, 3, 2 or 1 amino acid substitutions, e.g., conservative substitutions).

[0708] In one embodiment, the anti-BCMA binding domain comprises a light chain variable region described herein (e.g., in Table 7 or 8) and/or a heavy chain variable region described herein (e.g., in Table 7 or 8), or a sequence at least 85%, 90%, 95% or more identical thereto.

[0709] In one embodiment, the encoded anti-BCMA binding domain is a scFv comprising a light chain and a heavy chain of an amino acid sequence of Table 7 or 8.

[0710] In an embodiment, the human or humanized anti-BCMA binding domain (e.g., an scFv) comprises: a light chain variable region comprising an amino acid sequence having at least one, two or three modifications (e.g., substitutions, e.g., conservative substitutions) but not more than 30, 20 or 10 modifications (e.g., substitutions, e.g., conservative substitutions) of an amino acid sequence of a light chain variable region provided in Table 7 or 8, or a sequence at least 85%, 90%, 95% or more identical thereto; and/or a heavy chain variable region comprising an amino acid sequence having at least one, two or three modifications (e.g., substitutions, e.g., conservative substitutions) but not more than 30, 20 or 10 modifications (e.g., substitutions, e.g., conservative substitutions) of an amino acid sequence of a heavy chain variable region provided in Table 7 or 8, or a sequence at least 85%, 90%, 95% or more identical thereto.

TABLE 7
Amino Acid and Nucleic Acid Sequences of exemplary anti-BCMA
scFv domains and BCMA CAR molecules

| | | |
|---|---|---|
| | SEQ | |
| Name/ | ID | |
| Description | NO: | Sequence |

139109

| | | |
|---|---|---|
| 139109-aa | 967 | EVQLVESGGGLVQPGGSLRLSCAVSGFALSNHGMSWVRRAPGKGLEWV |
| ScFv | | SGIVYSGSTYYAASVKGRFTISRDNSRNTLYLQMNSLRPEDTAIYYCS |
| domain | | AHGGESDVWGQGTTVTVSSASGGGGSGGRASGGGGSDIQLTQSPSSLS |
| | | ASVGDRVTITCRASQSISSYLNWYQQKPGKAPKLLIYAASSLQSGVPS |
| | | RFSGSGSGTDFTLTISSLQPEDFATYYCQQSYSTPYTFGQGTKVEIK |
| 139109-nt | 968 | GAAGTGCAATTGGTGGAATCAGGGGGAGGACTTGTGCAGCCTGGAGGA |
| ScFv | | TCGCTGAGACTGTCATGTGCCGTGTCCGGCTTTGCCCTGTCCAACCAC |
| domain | | GGGATGTCCTGGGTCCGCCGCGCGCCTGGAAAGGGCCTCGAATGGGTG |
| | | TCGGGTATTGTGTACAGCGGTAGCACCTACTATGCCGCATCCGTGAAG |
| | | GGGAGATTCACCATCAGCCGGGACAACTCCAGGAACACTCTGTACCTC |
| | | CAAATGAATTCGCTGAGGCCAGAGGACACTGCCATCTACTACTGCTCC |
| | | GCGCATGGCGGAGAGTCCGACGTCTGGGGACAGGGGACCACCGTGACC |
| | | GTGTCTAGCGCGTCCGGCGGAGGCGGCAGCGGGGGTCGGGCATCAGGG |
| | | GGCGGCGGATCGGACATCCAGCTCACCCAGTCCCCGAGCTCGCTGTCC |
| | | GCCTCCGTGGGAGATCGGGTCACCATCACGTGCCGCGCCAGCCAGTCG |
| | | ATTTCCTCCTACCTGAACTGGTACCAACAGAAGCCCGGAAAAGCCCCG |
| | | AAGCTTCTCATCTACGCCGCCTCGAGCCTGCAGTCAGGAGTGCCCTCA |
| | | CGGTTCTCCGGCTCCGGTTCCGGTACTGATTTCACCCTGACCATTTCC |
| | | TCCCTGCAACCGGAGGACTTCGCTACTTACTACTGCCAGCAGTCGTAC |
| | | TCCACCCCCTACACTTTCGGACAAGGCACCAAGGTCGAAATCAAG |
| 139109-aa | 969 | EVQLVESGGGLVQPGGSLRLSCAVSGFALSNHGMSWVRRAPGKGLEWV |
| VH | | SGIVYSGSTYYAASVKGRFTISRDNSRNTLYLQMNSLRPEDTAIYYCS |
| | | AHGGESDVWGQGTTVTVSS |
| 139109-aa | 970 | DIQLTQSPSSLSASVGDRVTITCRASQSISSYLNWYQQKPGKAPKLLI |
| VL | | YAASSLQSGVPSRFSGSGSGTDFTLTISSLQPEDFATYYCQQSYSTPY |
| | | TFGQGTKVEIK |
| 139109-aa | 971 | MALPVTALLLPLALLLHAARPEVQLVESGGGLVQPGGSLRLSCAVSGF |
| Full CAR | | ALSNHGMSWVRRAPGKGLEWVSGIVYSGSTYYAASVKGRFTISRDNSR |
| | | NTLYLQMNSLRPEDTAIYYCSAHGGESDVWGQGTTVTVSSASGGGGSG |
| | | GRASGGGGSDIQLTQSPSSLSASVGDRVTITCRASQSISSYLNWYQQK |
| | | PGKAPKLLIYAASSLQSGVPSRFSGSGSGTDFTLTISSLQPEDFATYY |
| | | CQQSYSTPYTFGQGTKVEIKTTTPAPRPPTPAPTIASQPLSLRPEACR |
| | | PAAGGAVHTRGLDFACDIYIWAPLAGTCGVLLLSLVITLYCKRGRKKL |
| | | LYIFKQPFMRPVQTTQEEDGCSCRFPEEEEGGCELRVKFSRSADAPAY |
| | | KQGQNQLYNELNLGRREEYDVLDKRRGRDPEMGGKPRRKNPQEGLYNE |
| | | LQKDKMAEAYSEIGMKGERRRGKGHDGLYQGLSTATKDTYDALHMQAL |
| | | PPR |
| 139109-nt | 972 | ATGGCCCTCCCTGTCACCGCCCTGCTGCTTCCGCTGGCTCTTCTGCTC |
| Full CAR | | CACGCCGCTCGGCCCGAAGTGCAATTGGTGGAATCAGGGGGAGGACTT |
| | | GTGCAGCCTGGAGGATCGCTGAGACTGTCATGTGCCGTGTCCGGCTTT |
| | | GCCCTGTCCAACCACGGGATGTCCTGGGTCCGCCGCGCGCCTGGAAAG |
| | | GGCCTCGAATGGGTGTCGGGTATTGTGTACAGCGGTAGCACCTACTAT |
| | | GCCGCATCCGTGAAGGGGAGATTCACCATCAGCCGGGACAACTCCAGG |
| | | AACACTCTGTACCTCCAAATGAATTCGCTGAGGCCAGAGGACACTGCC |
| | | ATCTACTACTGCTCCGCGCATGGCGGAGAGTCCGACGTCTGGGGACAG |
| | | GGGACCACCGTGACCGTGTCTAGCGCGTCCGGCGGAGGCGGCAGCGGG |
| | | GGTCGGGCATCAGGGGGCGGCGGATCGGACATCCAGCTCACCCAGTCC |
| | | CCGAGCTCGCTGTCCGCCTCCGTGGGAGATCGGGTCACCATCACGTGC |
| | | CGCGCCAGCCAGTCGATTTCCTCCTACCTGAACTGGTACCAACAGAAG |
| | | CCCGGAAAAGCCCCGAAGCTTCTCATCTACGCCGCCTCGAGCCTGCAG |
| | | TCAGGAGTGCCCTCACGGTTCTCCGGCTCCGGTTCCGGTACTGATTTC |
| | | ACCCTGACCATTTCCTCCCTGCAACCGGAGGACTTCGCTACTTACTAC |
| | | TGCCAGCAGTCGTACTCCACCCCCTACACTTTCGGACAAGGCACCAAG |
| | | GTCGAAATCAAGACCACTACCCCAGCACCGAGGCCACCCACCCCGGCT |
| | | CCTACCATCGCCTCCCAGCCTCTGTCCCTGCGTCCGGAGGCATGTAGA |
| | | CCCGCAGCTGGTGGGGCCGTGCATACCCGGGGTCTTGACTTCGCCTGC |
| | | GATATCTACATTTGGGCCCCTCTGGCTGGTACTTGCGGGGTCCTGCTG |
| | | CTTTCACTCGTGATCACTCTTTACTGTAAGCGCGGTCGGAAGAAGCTG |
| | | CTGTACATCTTTAAGCAACCCTTCATGAGGCCTGTGCAGACTACTCAA |
| | | GAGGAGGACGGCTGTTCATGCCGGTTCCCAGAGGAGGAGGAAGGCGGC |
| | | TGCGAACTGCGCGTGAAATTCAGCCGCAGCGCAGATGCTCCAGCCTAC |
| | | AAGCAGGGGCAGAACCAGCTCTACAACGAACTCAATCTTGGTCGGAGA |
| | | GAGGAGTACGACGTGCTGGACAAGCGGAGAGGACGGGACCCAGAAATG |
| | | GGCGGGAAGCCGCGCAGAAAGAATCCCCAAGAGGGCCTGTACAACGAG |
| | | CTCCAAAAGGATAAGATGGCAGAAGCCTATAGCGAGATTGGTATGAAA |
| | | GGGGAACGCAGAAGAGGCAAAGGCCACGACGGACTGTACCAGGGACTC |
| | | AGCACCGCCACCAAGGACACCTATGACGCTCTTCACATGCAGGCCCTG |
| | | CCGCCTCGG |

139103

| | | |
|---|---|---|
| 139103-aa | 973 | QVQLVESGGGLVQPGRSLRLSCAASGFTFSNYAMSWVRQAPGKGLGWV |
| ScFv | | SGISRSGENTYYADSVKGRFTISRDNSKNTLYLQMNSLRDEDTAVYYC |
| domain | | ARSPAHYYGGMDVWGQGTTVTVSSASGGGGSGGRASGGGGSDIVLTQS |
| | | PGTLSLSPGERATLSCRASQSISSSFLAWYQQKPGQAPRLLIYGASRR |
| | | ATGIPDRFSGSGSGTDFTLTISRLEPEDSAVYYCQQYHSSPSWTFGQG |
| | | TKLEIK |
| 139103-nt | 974 | CAAGTGCAACTCGTGGAATCTGGTGGAGGACTCGTGCAACCCGGAAGA |
| ScFv | | TCGCTTAGACTGTCGTGTGCCGCCAGCGGGTTCACTTTCTCGAACTAC |
| domain | | GCGATGTCCTGGGTCCGCCAGGCACCCGGAAAGGGACTCGGTTGGGTG |
| | | TCCGGCATTTCCCGGTCCGGCGAAAATACCTACTACGCCGACTCCGTG |
| | | AAGGGCCGCTTCACCATCTCAAGGGACAACAGCAAAAACACCCTGTAC |
| | | TTGCAAATGAACTCCCTGCGGGATGAAGATACAGCCGTGTACTATTGC |
| | | GCCCGGTCGCCTGCCCATTACTACGGCGGAATGGACGTCTGGGGACAG |
| | | GGAACCACTGTGACTGTCAGCAGCGCGTCGGGTGGCGGCGGCTCAGGG |
| | | GGTCGGGCCTCCGGGGGGGGAGGGTCCGACATCGTGCTGACCCAGTCC |
| | | CCGGGAACCCTGAGCCTGAGCCCGGGAGAGCGCGCGACCCTGTCATGC |
| | | CGGGCATCCCAGAGCATTAGCTCCTCCTTTCTCGCCTGGTATCAGCAG |
| | | AAGCCCGGACAGGCCCCGAGGCTGCTGATCTACGGCGCTAGCAGAAGG |
| | | GCTACCGGAATCCCAGACCGGTTCTCCGGCTCCGGTTCCGGGACCGAT |
| | | TTCACCCTTACTATCTCGCGCCTGGAACCTGAGGACTCCGCCGTCTAC |
| | | TACTGCCAGCAGTACCACTCATCCCCGTCGTGGACGTTCGGACAGGGC |
| | | ACCAAGCTGGAGATTAAG |
| 139103-aa | 975 | QVQLVESGGGLVQPGRSLRLSCAASGFTFSNYAMSWVRQAPGKGLGWV |
| VH | | SGISRSGENTYYADSVKGRFTISRDNSKNTLYLQMNSLRDEDTAVYYC |
| | | ARSPAHYYGGMDVWGQGTTVTVSS |
| 139103-aa | 976 | DIVLTQSPGTLSLSPGERATLSCRASQSISSSFLAWYQQKPGQAPRLL |
| VL | | IYGASRRATGIPDRFSGSGSGTDFTLTISRLEPEDSAVYYCQQYHSSP |
| | | SWTFGQGTKLEIK |
| 139103-aa | 977 | MALPVTALLLPLALLLHAARPQVQLVESGGGLVQPGRSLRLSCAASGF |
| Full CAR | | TFSNYAMSWVRQAPGKGLGWVSGISRSGENTYYADSVKGRFTISRDNS |
| | | KNTLYLQMNSLRDEDTAVYYCARSPAHYYGGMDVWGQGTTVTVSSASG |
| | | GGGSGGRASGGGGSDIVLTQSPGTLSLSPGERATLSCRASQSISSSFL |
| | | AWYQQKPGQAPRLLIYGASRRATGIPDRFSGSGSGTDFTLTISRLEPE |
| | | DSAVYYCQQYHSSPSWTFGQGTKLEIKTTTPAPRPPTPAPTIASQPLS |
| | | LRPEACRPAAGGAVHTRGLDFACDIYIWAPLAGTCGVLLLSLVITLYC |
| | | KRGRKKLLYIFKQPFMRPVQTTQEEDGCSCRFPEEEEGGCELRVKFSR |
| | | SADAPAYKQGQNQLYNELNLGRREEYDVLDKRRGRDPEMGGKPRRKNP |
| | | QEGLYNELQKDKMAEAYSEIGMKGERRRGKGHDGLYQGLSTATKDTYD |
| | | ALHMQALPPR |
| 139103-nt | 978 | ATGGCCCTCCCTGTCACCGCCCTGCTGCTTCCGCTGGCTCTTCTGCTC |
| Full CAR | | CACGCCGCTCGGCCCCAAGTGCAACTCGTGGAATCTGGTGGAGGACTC |
| | | GTGCAACCCGGAAGATCGCTTAGACTGTCGTGTGCCGCCAGCGGGTTC |
| | | ACTTTCTCGAACTACGCGATGTCCTGGGTCCGCCAGGCACCCGGAAAG |
| | | GGACTCGGTTGGGTGTCCGGCATTTCCCGGTCCGGCGAAAATACCTAC |
| | | TACGCCGACTCCGTGAAGGGCCGCTTCACCATCTCAAGGGACAACAGC |
| | | AAAAACACCCTGTACTTGCAAATGAACTCCCTGCGGGATGAAGATACA |
| | | GCCGTGTACTATTGCGCCCGGTCGCCTGCCCATTACTACGGCGGAATG |
| | | GACGTCTGGGGACAGGGAACCACTGTGACTGTCAGCAGCGCGTCGGGT |
| | | GGCGGCGGCTCAGGGGGTCGGGCCTCCGGGGGGGGAGGGTCCGACATC |
| | | GTGCTGACCCAGTCCCCGGGAACCCTGAGCCTGAGCCCGGGAGAGCGC |
| | | GCGACCCTGTCATGCCGGGCATCCCAGAGCATTAGCTCCTCCTTTCTC |
| | | GCCTGGTATCAGCAGAAGCCCGGACAGGCCCCGAGGCTGCTGATCTAC |
| | | GGCGCTAGCAGAAGGGCTACCGGAATCCCAGACCGGTTCTCCGGCTCC |
| | | GGTTCCGGGACCGATTTCACCCTTACTATCTCGCGCCTGGAACCTGAG |
| | | GACTCCGCCGTCTACTACTGCCAGCAGTACCACTCATCCCCGTCGTGG |
| | | ACGTTCGGACAGGGCACCAAGCTGGAGATTAAGACCACTACCCCAGCA |
| | | CCGAGGCCACCCACCCCGGCTCCTACCATCGCCTCCCAGCCTCTGTCC |
| | | CTGCGTCCGGAGGCATGTAGACCCGCAGCTGGTGGGGCCGTGCATACC |
| | | CGGGGTCTTGACTTCGCCTGCGATATCTACATTTGGGCCCCTCTGGCT |
| | | GGTACTTGCGGGGTCCTGCTGCTTTCACTCGTGATCACTCTTTACTGT |
| | | AAGCGCGGTCGGAAGAAGCTGCTGTACATCTTTAAGCAACCCTTCATG |
| | | AGGCCTGTGCAGACTACTCAAGAGGAGGACGGCTGTTCATGCCGGTTC |
| | | CCAGAGGAGGAGGAAGGCGGCTGCGAACTGCGCGTGAAATTCAGCCGC |
| | | AGCGCAGATGCTCCAGCCTACAAGCAGGGGCAGAACCAGCTCTACAAC |
| | | GAACTCAATCTTGGTCGGAGAGAGGAGTACGACGTGCTGGACAAGCGG |
| | | AGAGGACGGGACCCAGAAATGGGCGGGAAGCCGCGCAGAAAGAATCCC |
| | | CAAGAGGGCCTGTACAACGAGCTCCAAAAGGATAAGATGGCAGAAGCC |
| | | TATAGCGAGATTGGTATGAAAGGGGAACGCAGAAGAGGCAAAGGCCAC |
| | | GACGGACTGTACCAGGGACTCAGCACCGCCACCAAGGACACCTATGAC |
| | | GCTCTTCACATGCAGGCCCTGCCGCCTCGG |

139105

| | | |
|---|---|---|
| 139105-aa | 979 | QVQLVESGGGLVQPGRSLRLSCAASGFTFDDYAMHWVRQAPGKGLEWV |
| ScFv | | SGISWNSGSIGYADSVKGRFTISRDNAKNSLYLQMNSLRAEDTALYYC |
| domain | | SVHSFLAYWGQGTLVTVSSASGGGGSGGRASGGGGSDIVMTQTPLSLP |
| | | VTPGEPASISCRSSQSLLHSNGYNYLDWYLQKPGQSPQLLIYLGSNRA |
| | | SGVPDRFSGSGSGTDFTLKISRVEAEDVGVYYCMQALQTPYTFGQGTK |
| | | VEIK |
| 139105-nt | 980 | CAAGTGCAACTCGTCGAATCCGGTGGAGGTCTGGTCCAACCTGGTAGA |
| ScFv | | AGCCTGAGACTGTCGTGTGCGGCCAGCGGATTCACCTTTGATGACTAT |
| domain | | GCTATGCACTGGGTGCGGCAGGCCCCAGGAAAGGGCCTGGAATGGGTG |
| | | TCGGGAATTAGCTGGAACTCCGGGTCCATTGGCTACGCCGACTCCGTG |
| | | AAGGGCCGCTTCACCATCTCCCGCGACAACGCAAAGAACTCCCTGTAC |
| | | TTGCAAATGAACTCGCTCAGGGCTGAGGATACCGCGCTGTACTACTGC |
| | | TCCGTGCATTCCTTCCTGGCCTACTGGGGACAGGGAACTCTGGTCACC |
| | | GTGTCGAGCGCCTCCGGCGGCGGGGGCTCGGGTGGACGGGCCTCGGGC |
| | | GGAGGGGGGTCCGACATCGTGATGACCCAGACCCCGCTGAGCTTGCCC |
| | | GTGACTCCCGGAGAGCCTGCATCCATCTCCTGCCGGTCATCCCAGTCC |
| | | CTTCTCCACTCCAACGGATACAACTACCTCGACTGGTACCTCCAGAAG |
| | | CCGGGACAGAGCCCTCAGCTTCTGATCTACCTGGGGTCAAATAGAGCC |
| | | TCAGGAGTGCCGGATCGGTTCAGCGGATCTGGTTCGGGAACTGATTTC |
| | | ACTCTGAAGATTTCCCGCGTGGAAGCCGAGGACGTGGGCGTCTACTAC |
| | | TGTATGCAGGCGCTGCAGACCCCCTATACCTTCGGCCAAGGGACGAAA |
| | | GTGGAGATCAAG |
| 139105-aa | 981 | QVQLVESGGGLVQPGRSLRLSCAASGFTFDDYAMHWVRQAPGKGLEWV |
| VH | | SGISWNSGSIGYADSVKGRFTISRDNAKNSLYLQMNSLRAEDTALYYC |
| | | SVHSFLAYWGQGTLVTVSS |
| 139105-aa | 982 | DIVMTQTPLSLPVTPGEPASISCRSSQSLLHSNGYNYLDWYLQKPGQS |
| VL | | PQLLIYLGSNRASGVPDRFSGSGSGTDFTLKISRVEAEDVGVYYCMQA |
| | | LQTPYTFGQGTKVEIK |
| 139105-aa | 983 | MALPVTALLLPLALLLHAARPQVQLVESGGGLVQPGRSLRLSCAASGF |
| Full CAR | | TFDDYAMHWVRQAPGKGLEWVSGISWNSGSIGYADSVKGRFTISRDNA |
| | | KNSLYLQMNSLRAEDTALYYCSVHSFLAYWGQGTLVTVSSASGGGGSG |
| | | GRASGGGGSDIVMTQTPLSLPVTPGEPASISCRSSQSLLHSNGYNYLD |
| | | WYLQKPGQSPQLLIYLGSNRASGVPDRFSGSGSGTDFTLKISRVEAED |
| | | VGVYYCMQALQTPYTFGQGTKVEIKTTTPAPRPPTPAPTIASQPLSLR |
| | | PEACRPAAGGAVHTRGLDFACDIYIWAPLAGTCGVLLLSLVITLYCKR |
| | | GRKKLLYIFKQPFMRPVQTTQEEDGCSCRFPEEEEGGCELRVKFSRSA |
| | | DAPAYKQGQNQLYNELNLGRREEYDVLDKRRGRDPEMGGKPRRKNPQE |
| | | GLYNELQKDKMAEAYSEIGMKGERRRGKGHDGLYQGLSTATKDTYDAL |
| | | HMQALPPR |
| 139105-nt | 984 | ATGGCCCTCCCTGTCACCGCCCTGCTGCTTCCGCTGGCTCTTCTGCTC |
| Full CAR | | CACGCCGCTCGGCCCCAAGTGCAACTCGTCGAATCCGGTGGAGGTCTG |
| | | GTCCAACCTGGTAGAAGCCTGAGACTGTCGTGTGCGGCCAGCGGATTC |
| | | ACCTTTGATGACTATGCTATGCACTGGGTGCGGCAGGCCCCAGGAAAG |
| | | GGCCTGGAATGGGTGTCGGGAATTAGCTGGAACTCCGGGTCCATTGGC |
| | | TACGCCGACTCCGTGAAGGGCCGCTTCACCATCTCCCGCGACAACGCA |
| | | AAGAACTCCCTGTACTTGCAAATGAACTCGCTCAGGGCTGAGGATACC |
| | | GCGCTGTACTACTGCTCCGTGCATTCCTTCCTGGCCTACTGGGGACAG |
| | | GGAACTCTGGTCACCGTGTCGAGCGCCTCCGGCGGCGGGGGCTCGGGT |
| | | GGACGGGCCTCGGGCGGAGGGGGGTCCGACATCGTGATGACCCAGACC |
| | | CCGCTGAGCTTGCCCGTGACTCCCGGAGAGCCTGCATCCATCTCCTGC |
| | | CGGTCATCCCAGTCCCTTCTCCACTCCAACGGATACAACTACCTCGAC |
| | | TGGTACCTCCAGAAGCCGGGACAGAGCCCTCAGCTTCTGATCTACCTG |
| | | GGGTCAAATAGAGCCTCAGGAGTGCCGGATCGGTTCAGCGGATCTGGT |
| | | TCGGGAACTGATTTCACTCTGAAGATTTCCCGCGTGGAAGCCGAGGAC |
| | | GTGGGCGTCTACTACTGTATGCAGGCGCTGCAGACCCCCTATACCTTC |
| | | GGCCAAGGGACGAAAGTGGAGATCAAGACCACTACCCCAGCACCGAGG |
| | | CCACCCACCCCGGCTCCTACCATCGCCTCCCAGCCTCTGTCCCTGCGT |
| | | CCGGAGGCATGTAGACCCGCAGCTGGTGGGGCCGTGCATACCCGGGGT |
| | | CTTGACTTCGCCTGCGATATCTACATTTGGGCCCCTCTGGCTGGTACT |
| | | TGCGGGGTCCTGCTGCTTTCACTCGTGATCACTCTTTACTGTAAGCGC |
| | | GGTCGGAAGAAGCTGCTGTACATCTTTAAGCAACCCTTCATGAGGCCT |
| | | GTGCAGACTACTCAAGAGGAGGACGGCTGTTCATGCCGGTTCCCAGAG |
| | | GAGGAGGAAGGCGGCTGCGAACTGCGCGTGAAATTCAGCCGCAGCGCA |
| | | GATGCTCCAGCCTACAAGCAGGGGCAGAACCAGCTCTACAACGAACTC |
| | | AATCTTGGTCGGAGAGAGGAGTACGACGTGCTGGACAAGCGGAGAGGA |
| | | CGGGACCCAGAAATGGGCGGGAAGCCGCGCAGAAAGAATCCCCAAGAG |
| | | GGCCTGTACAACGAGCTCCAAAAGGATAAGATGGCAGAAGCCTATAGC |
| | | GAGATTGGTATGAAAGGGGAACGCAGAAGAGGCAAAGGCCACGACGGA |
| | | CTGTACCAGGGACTCAGCACCGCCACCAAGGACACCTATGACGCTCTT |
| | | CACATGCAGGCCCTGCCGCCTCGG |

139111

| | | |
|---|---|---|
| 139111-aa | 985 | EVQLLESGGGLVQPGGSLRLSCAVSGFALSNHGMSWVRRAPGKGLEWV |
| ScFv | | SGIVYSGSTYYAASVKGRFTISRDNSRNTLYLQMNSLRPEDTAIYYCS |
| domain | | AHGGESDVWGQGTTVTVSSASGGGGSGGRASGGGGSDIVMTQTPLSLS |
| | | VTPGQPASISCKSSQSLLRNDGKTPLYWYLQKAGQPPQLLIYEVSNRF |
| | | SGVPDRFSGSGSGTDFTLKISRVEAEDVGAYYCMQNIQFPSFGGGTKL |
| | | EIK |
| 139111-nt | 986 | GAAGTGCAATTGTTGGAATCTGGAGGAGGACTTGTGCAGCCTGGAGGA |
| ScFv | | TCACTGAGACTTTCGTGTGCGGTGTCAGGCTTCGCCCTGAGCAACCAC |
| domain | | GGCATGAGCTGGGTGCGGAGAGCCCCGGGGAAGGGTCTGGAATGGGTG |
| | | TCCGGGATCGTCTACTCCGGTTCAACTTACTACGCCGCAAGCGTGAAG |
| | | GGTCGCTTCACCATTTCCCGCGATAACTCCCGGAACACCCTGTACCTC |
| | | CAAATGAACTCCCTGCGGCCCGAGGACACCGCCATCTACTACTGTTCC |
| | | GCGCATGGAGGAGAGTCCGATGTCTGGGGACAGGGCACTACCGTGACC |
| | | GTGTCGAGCGCCTCGGGGGGAGGAGGCTCCGGCGGTCGCGCCTCCGGG |
| | | GGGGGTGGCAGCGACATTGTGATGACGCAGACTCCACTCTCGCTGTCC |
| | | GTGACCCCGGGACAGCCCGCGTCCATCTCGTGCAAGAGCTCCCAGAGC |
| | | CTGCTGAGGAACGACGGAAAGACTCCTCTGTATTGGTACCTCCAGAAG |
| | | GCTGGACAGCCCCCGCAACTGCTCATCTACGAAGTGTCAAATCGCTTC |
| | | TCCGGGGTGCCGGATCGGTTTTCCGGCTCGGGATCGGGCACCGACTTC |
| | | ACCCTGAAAATCTCCAGGGTCGAGGCCGAGGACGTGGGAGCCTACTAC |
| | | TGCATGCAAAACATCCAGTTCCCTTCCTTCGGCGGCGGCACAAAGCTG |
| | | GAGATTAAG |
| 139111-aa | 987 | EVQLLESGGGLVQPGGSLRLSCAVSGFALSNHGMSWVRRAPGKGLEWV |
| VH | | SGIVYSGSTYYAASVKGRFTISRDNSRNTLYLQMNSLRPEDTAIYYCS |
| | | AHGGESDVWGQGTTVTVSS |
| 139111-aa | 988 | DIVMTQTPLSLSVTPGQPASISCKSSQSLLRNDGKTPLYWYLQKAGQP |
| VL | | PQLLIYEVSNRFSGVPDRFSGSGSGTDFTLKISRVEAEDVGAYYCMQN |
| | | IQFPSFGGGTKLEIK |
| 139111-aa | 989 | MALPVTALLLPLALLLHAARPEVQLLESGGGLVQPGGSLRLSCAVSGF |
| Full CAR | | ALSNHGMSWVRRAPGKGLEWVSGIVYSGSTYYAASVKGRFTISRDNSR |
| | | NTLYLQMNSLRPEDTAIYYCSAHGGESDVWGQGTTVTVSSASGGGGSG |
| | | GRASGGGGSDIVMTQTPLSLSVTPGQPASISCKSSQSLLRNDGKTPLY |
| | | WYLQKAGQPPQLLIYEVSNRFSGVPDRFSGSGSGTDFTLKISRVEAED |
| | | VGAYYCMQNIQFPSFGGGTKLEIKTTTPAPRPPTPAPTIASQPLSLRP |
| | | EACRPAAGGAVHTRGLDFACDIYIWAPLAGTCGVLLLSLVITLYCKRG |
| | | RKKLLYIFKQPFMRPVQTTQEEDGCSCRFPEEEEGGCELRVKFSRSAD |
| | | APAYKQGQNQLYNELNLGRREEYDVLDKRRGRDPEMGGKPRRKNPQEG |
| | | LYNELQKDKMAEAYSEIGMKGERRRGKGHDGLYQGLSTATKDTYDALH |
| | | MQALPPR |
| 139111-nt | 990 | ATGGCCCTCCCTGTCACCGCCCTGCTGCTTCCGCTGGCTCTTCTGCTC |
| Full CAR | | CACGCCGCTCGGCCCGAAGTGCAATTGTTGGAATCTGGAGGAGGACTT |
| | | GTGCAGCCTGGAGGATCACTGAGACTTTCGTGTGCGGTGTCAGGCTTC |
| | | GCCCTGAGCAACCACGGCATGAGCTGGGTGCGGAGAGCCCCGGGGAAG |
| | | GGTCTGGAATGGGTGTCCGGGATCGTCTACTCCGGTTCAACTTACTAC |
| | | GCCGCAAGCGTGAAGGGTCGCTTCACCATTTCCCGCGATAACTCCCGG |
| | | AACACCCTGTACCTCCAAATGAACTCCCTGCGGCCCGAGGACACCGCC |
| | | ATCTACTACTGTTCCGCGCATGGAGGAGAGTCCGATGTCTGGGGACAG |
| | | GGCACTACCGTGACCGTGTCGAGCGCCTCGGGGGGAGGAGGCTCCGGC |
| | | GGTCGCGCCTCCGGGGGGGGTGGCAGCGACATTGTGATGACGCAGACT |
| | | CCACTCTCGCTGTCCGTGACCCCGGGACAGCCCGCGTCCATCTCGTGC |
| | | AAGAGCTCCCAGAGCCTGCTGAGGAACGACGGAAAGACTCCTCTGTAT |
| | | TGGTACCTCCAGAAGGCTGGACAGCCCCCGCAACTGCTCATCTACGAA |
| | | GTGTCAAATCGCTTCTCCGGGGTGCCGGATCGGTTTTCCGGCTCGGGA |
| | | TCGGGCACCGACTTCACCCTGAAAATCTCCAGGGTCGAGGCCGAGGAC |
| | | GTGGGAGCCTACTACTGCATGCAAAACATCCAGTTCCCTTCCTTCGGC |
| | | GGCGGCACAAAGCTGGAGATTAAGACCACTACCCCAGCACCGAGGCCA |
| | | CCCACCCCGGCTCCTACCATCGCCTCCCAGCCTCTGTCCCTGCGTCCG |
| | | GAGGCATGTAGACCCGCAGCTGGTGGGGCCGTGCATACCCGGGGTCTT |
| | | GACTTCGCCTGCGATATCTACATTTGGGCCCCTCTGGCTGGTACTTGC |
| | | GGGGTCCTGCTGCTTTCACTCGTGATCACTCTTTACTGTAAGCGCGGT |
| | | CGGAAGAAGCTGCTGTACATCTTTAAGCAACCCTTCATGAGGCCTGTG |
| | | CAGACTACTCAAGAGGAGGACGGCTGTTCATGCCGGTTCCCAGAGGAG |
| | | GAGGAAGGCGGCTGCGAACTGCGCGTGAAATTCAGCCGCAGCGCAGAT |
| | | GCTCCAGCCTACAAGCAGGGGCAGAACCAGCTCTACAACGAACTCAAT |
| | | CTTGGTCGGAGAGAGGAGTACGACGTGCTGGACAAGCGGAGAGGACGG |
| | | GACCCAGAAATGGGCGGGAAGCCGCGCAGAAAGAATCCCCAAGAGGGC |
| | | CTGTACAACGAGCTCCAAAAGGATAAGATGGCAGAAGCCTATAGCGAG |
| | | ATTGGTATGAAAGGGGAACGCAGAAGAGGCAAAGGCCACGACGGACTG |
| | | TACCAGGGACTCAGCACCGCCACCAAGGACACCTATGACGCTCTTCAC |
| | | ATGCAGGCCCTGCCGCCTCGG |

139100

| | | |
|---|---|---|
| 139100-aa | 991 | QVQLVQSGAEVRKTGASVKVSCKASGYIFDNFGINWVRQAPGQGLEWM |
| ScFv | | GWINPKNNNTNYAQKFQGRVTITADESTNTAYMEVSSLRSEDTAVYYC |
| domain | | ARGPYYYQSYMDVWGQGTMVTVSSASGGGGSGGRASGGGGSDIVMTQT |
| | | PLSLPVTPGEPASISCRSSQSLLHSNGYNYLNWYLQKPGQSPQLLIYL |
| | | GSKRASGVPDRFSGSGSGTDFTLHITRVGAEDVGVYYCMQALQTPYTF |
| | | GQGTKLEIK |
| 139100-nt | 992 | CAAGTCCAACTCGTCCAGTCCGGCGCAGAAGTCAGAAAAACCGGTGCT |
| ScFv | | AGCGTGAAAGTGTCCTGCAAGGCCTCCGGCTACATTTTCGATAACTTC |
| domain | | GGAATCAACTGGGTCAGACAGGCCCCGGGCCAGGGGCTGGAATGGATG |
| | | GGATGGATCAACCCCAAGAACAACAACACCAACTACGCACAGAAGTTC |
| | | CAGGGCCGCGTGACTATCACCGCCGATGAATCGACCAATACCGCCTAC |
| | | ATGGAGGTGTCCTCCCTGCGGTCGGAGGACACTGCCGTGTATTACTGC |
| | | GCGAGGGGCCCATACTACTACCAAAGCTACATGGACGTCTGGGGACAG |
| | | GGAACCATGGTGACCGTGTCATCCGCCTCCGGTGGTGGAGGCTCCGGG |
| | | GGGCGGGCTTCAGGAGGCGGAGGAAGCGATATTGTGATGACCCAGACT |
| | | CCGCTTAGCCTGCCCGTGACTCCTGGAGAACCGGCCTCCATTTCCTGC |
| | | CGGTCCTCGCAATCACTCCTGCATTCCAACGGTTACAACTACCTGAAT |
| | | TGGTACCTCCAGAAGCCTGGCCAGTCGCCCCAGTTGCTGATCTATCTG |
| | | GGCTCGAAGCGCGCCTCCGGGGTGCCTGACCGGTTTAGCGGATCTGGG |
| | | AGCGGCACGGACTTCACTCTCCACATCACCCGCGTGGGAGCGGAGGAC |
| | | GTGGGAGTGTACTACTGTATGCAGGCGCTGCAGACTCCGTACACATTC |
| | | GGACAGGGCACCAAGCTGGAGATCAAG |
| 139100-aa | 993 | QVQLVQSGAEVRKTGASVKVSCKASGYIFDNFGINWVRQAPGQGLEWM |
| VH | | GWINPKNNNTNYAQKFQGRVTITADESTNTAYMEVSSLRSEDTAVYYC |
| | | ARGPYYYQSYMDVWGQGTMVTVSS |
| 139100-aa | 994 | DIVMTQTPLSLPVTPGEPASISCRSSQSLLHSNGYNYLNWYLQKPGQS |
| VL | | PQLLIYLGSKRASGVPDRFSGSGSGTDFTLHITRVGAEDVGVYYCMQA |
| | | LQTPYTFGQGTKLEIK |
| 139100-aa | 995 | MALPVTALLLPLALLLHAARPQVQLVQSGAEVRKTGASVKVSCKASGY |
| Full CAR | | IFDNFGINWVRQAPGQGLEWMGWINPKNNNTNYAQKFQGRVTITADES |
| | | TNTAYMEVSSLRSEDTAVYYCARGPYYYQSYMDVWGQGTMVTVSSASG |
| | | GGGSGGRASGGGGSDIVMTQTPLSLPVTPGEPASISCRSSQSLLHSNG |
| | | YNYLNWYLQKPGQSPQLLIYLGSKRASGVPDRFSGSGSGTDFTLHITR |
| | | VGAEDVGVYYCMQALQTPYTFGQGTKLEIKTTTPAPRPPTPAPTIASQ |
| | | PLSLRPEACRPAAGGAVHTRGLDFACDIYIWAPLAGTCGVLLLSLVIT |
| | | LYCKRGRKKLLYIFKQPFMRPVQTTQEEDGCSCRFPEEEEGGCELRVK |
| | | FSRSADAPAYKQGQNQLYNELNLGRREEYDVLDKRRGRDPEMGGKPRR |
| | | KNPQEGLYNELQKDKMAEAYSEIGMKGERRRGKGHDGLYQGLSTATKD |
| | | TYDALHMQALPPR |
| 139100-nt | 996 | ATGGCCCTCCCTGTCACCGCCCTGCTGCTTCCGCTGGCTCTTCTGCTC |
| Full CAR | | CACGCCGCTCGGCCCCAAGTCCAACTCGTCCAGTCCGGCGCAGAAGTC |
| | | AGAAAAACCGGTGCTAGCGTGAAAGTGTCCTGCAAGGCCTCCGGCTAC |
| | | ATTTTCGATAACTTCGGAATCAACTGGGTCAGACAGGCCCCGGGCCAG |
| | | GGGCTGGAATGGATGGGATGGATCAACCCCAAGAACAACAACACCAAC |
| | | TACGCACAGAAGTTCCAGGGCCGCGTGACTATCACCGCCGATGAATCG |
| | | ACCAATACCGCCTACATGGAGGTGTCCTCCCTGCGGTCGGAGGACACT |
| | | GCCGTGTATTACTGCGCGAGGGGCCCATACTACTACCAAAGCTACATG |
| | | GACGTCTGGGGACAGGGAACCATGGTGACCGTGTCATCCGCCTCCGGT |
| | | GGTGGAGGCTCCGGGGGGCGGGCTTCAGGAGGCGGAGGAAGCGATATT |
| | | GTGATGACCCAGACTCCGCTTAGCCTGCCCGTGACTCCTGGAGAACCG |
| | | GCCTCCATTTCCTGCCGGTCCTCGCAATCACTCCTGCATTCCAACGGT |
| | | TACAACTACCTGAATTGGTACCTCCAGAAGCCTGGCCAGTCGCCCCAG |
| | | TTGCTGATCTATCTGGGCTCGAAGCGCGCCTCCGGGGTGCCTGACCGG |
| | | TTTAGCGGATCTGGGAGCGGCACGGACTTCACTCTCCACATCACCCGC |
| | | GTGGGAGCGGAGGACGTGGGAGTGTACTACTGTATGCAGGCGCTGCAG |
| | | ACTCCGTACACATTCGGACAGGGCACCAAGCTGGAGATCAAGACCACT |
| | | ACCCCAGCACCGAGGCCACCCACCCCGGCTCCTACCATCGCCTCCCAG |
| | | CCTCTGTCCCTGCGTCCGGAGGCATGTAGACCCGCAGCTGGTGGGGCC |
| | | GTGCATACCCGGGGTCTTGACTTCGCCTGCGATATCTACATTTGGGCC |
| | | CCTCTGGCTGGTACTTGCGGGGTCCTGCTGCTTTCACTCGTGATCACT |
| | | CTTTACTGTAAGCGCGGTCGGAAGAAGCTGCTGTACATCTTTAAGCAA |
| | | CCCTTCATGAGGCCTGTGCAGACTACTCAAGAGGAGGACGGCTGTTCA |
| | | TGCCGGTTCCCAGAGGAGGAGGAAGGCGGCTGCGAACTGCGCGTGAAA |
| | | TTCAGCCGCAGCGCAGATGCTCCAGCCTACAAGCAGGGGCAGAACCAG |
| | | CTCTACAACGAACTCAATCTTGGTCGGAGAGAGGAGTACGACGTGCTG |
| | | GACAAGCGGAGAGGACGGGACCCAGAAATGGGCGGGAAGCCGCGCAGA |
| | | AAGAATCCCCAAGAGGGCCTGTACAACGAGCTCCAAAAGGATAAGATG |
| | | GCAGAAGCCTATAGCGAGATTGGTATGAAAGGGGAACGCAGAAGAGGC |
| | | AAAGGCCACGACGGACTGTACCAGGGACTCAGCACCGCCACCAAGGAC |
| | | ACCTATGACGCTCTTCACATGCAGGCCCTGCCGCCTCGG |

139101

| | | |
|---|---|---|
| 139101-aa | 997 | QVQLQESGGGLVQPGGSLRLSCAASGFTFSSDAMTWVRQAPGKGLEWV |
| ScFv | | SVISGSGGTTYYADSVKGRFTISRDNSKNTLYLQMNSLRAEDTAVYYC |
| domain | | AKLDSSGYYYARGPRYWGQGTLVTVSSASGGGGSGGRASGGGGSDIQL |
| | | TQSPSSLSASVGDRVTITCRASQSISSYLNWYQQKPGKAPKLLIYGAS |
| | | TLASGVPARFSGSGSGTHFTLTINSLQSEDSATYYCQQSYKRASFGQG |
| | | TKVEIK |
| 139101-nt | 998 | CAAGTGCAACTTCAAGAATCAGGCGGAGGACTCGTGCAGCCCGGAGGA |
| ScFv | | TCATTGCGGCTCTCGTGCGCCGCCTCGGGCTTCACCTTCTCGAGCGAC |
| domain | | GCCATGACCTGGGTCCGCCAGGCCCCGGGGAAGGGGCTGGAATGGGTG |
| | | TCTGTGATTTCCGGCTCCGGGGGAACTACGTACTACGCCGATTCCGTG |
| | | AAAGGTCGCTTCACTATCTCCCGGGACAACAGCAAGAACACCCTTTAT |
| | | CTGCAAATGAATTCCCTCCGCGCCGAGGACACCGCCGTGTACTACTGC |
| | | GCCAAGCTGGACTCCTCGGGCTACTACTATGCCCGGGGTCCGAGATAC |
| | | TGGGGACAGGGAACCCTCGTGACCGTGTCCTCCGCGTCCGGCGGAGGA |
| | | GGGTCGGGAGGGCGGGCCTCCGGCGGCGGCGGTTCGGACATCCAGCTG |
| | | ACCCAGTCCCCATCCTCACTGAGCGCAAGCGTGGGCGACAGAGTCACC |
| | | ATTACATGCAGGGCGTCCCAGAGCATCAGCTCCTACCTGAACTGGTAC |
| | | CAACAGAAGCCTGGAAAGGCTCCTAAGCTGTTGATCTACGGGGCTTCG |
| | | ACCCTGGCATCCGGGGTGCCCGCGAGGTTTAGCGGAAGCGGTAGCGGC |
| | | ACTCACTTCACTCTGACCATTAACAGCCTCCAGTCCGAGGATTCAGCC |
| | | ACTTACTACTGTCAGCAGTCCTACAAGCGGGCCAGCTTCGGACAGGGC |
| | | ACTAAGGTCGAGATCAAG |
| 139101-aa | 999 | QVQLQESGGGLVQPGGSLRLSCAASGFTFSSDAMTWVRQAPGKGLEWV |
| VH | | SVISGSGGTTYYADSVKGRFTISRDNSKNTLYLQMNSLRAEDTAVYYC |
| | | AKLDSSGYYYARGPRYWGQGTLVTVSS |
| 139101-aa | 1000 | DIQLTQSPSSLSASVGDRVTITCRASQSISSYLNWYQQKPGKAPKLLI |
| VL | | YGASTLASGVPARFSGSGSGTHFTLTINSLQSEDSATYYCQQSYKRAS |
| | | FGQGTKVEIK |
| 139101-aa | 1001 | MALPVTALLLPLALLLHAARPQVQLQESGGGLVQPGGSLRLSCAASGF |
| Full CAR | | TFSSDAMTWVRQAPGKGLEWVSVISGSGGTTYYADSVKGRFTISRDNS |
| | | KNTLYLQMNSLRAEDTAVYYCAKLDSSGYYYARGPRYWGQGTLVTVSS |
| | | ASGGGGSGGRASGGGGSDIQLTQSPSSLSASVGDRVTITCRASQSISS |
| | | YLNWYQQKPGKAPKLLIYGASTLASGVPARFSGSGSGTHFTLTINSLQ |
| | | SEDSATYYCQQSYKRASFGQGTKVEIKTTTPAPRPPTPAPTIASQPLS |
| | | LRPEACRPAAGGAVHTRGLDFACDIYIWAPLAGTCGVLLLSLVITLYC |
| | | KRGRKKLLYIFKQPFMRPVQTTQEEDGCSCRFPEEEEGGCELRVKFSR |
| | | SADAPAYKQGQNQLYNELNLGRREEYDVLDKRRGRDPEMGGKPRRKNP |
| | | QEGLYNELQKDKMAEAYSEIGMKGERRRGKGHDGLYQGLSTATKDTYD |
| | | ALHMQALPPR |
| 139101-nt | 1002 | ATGGCCCTCCCTGTCACCGCCCTGCTGCTTCCGCTGGCTCTTCTGCTC |
| Full CAR | | CACGCCGCTCGGCCCCAAGTGCAACTTCAAGAATCAGGCGGAGGACTC |
| | | GTGCAGCCCGGAGGATCATTGCGGCTCTCGTGCGCCGCCTCGGGCTTC |
| | | ACCTTCTCGAGCGACGCCATGACCTGGGTCCGCCAGGCCCCGGGGAAG |
| | | GGGCTGGAATGGGTGTCTGTGATTTCCGGCTCCGGGGGAACTACGTAC |
| | | TACGCCGATTCCGTGAAAGGTCGCTTCACTATCTCCCGGGACAACAGC |
| | | AAGAACACCCTTTATCTGCAAATGAATTCCCTCCGCGCCGAGGACACC |
| | | GCCGTGTACTACTGCGCCAAGCTGGACTCCTCGGGCTACTACTATGCC |
| | | CGGGGTCCGAGATACTGGGGACAGGGAACCCTCGTGACCGTGTCCTCC |
| | | GCGTCCGGCGGAGGAGGGTCGGGAGGGCGGGCCTCCGGCGGCGGCGGT |
| | | TCGGACATCCAGCTGACCCAGTCCCCATCCTCACTGAGCGCAAGCGTG |
| | | GGCGACAGAGTCACCATTACATGCAGGGCGTCCCAGAGCATCAGCTCC |
| | | TACCTGAACTGGTACCAACAGAAGCCTGGAAAGGCTCCTAAGCTGTTG |
| | | ATCTACGGGGCTTCGACCCTGGCATCCGGGGTGCCCGCGAGGTTTAGC |
| | | GGAAGCGGTAGCGGCACTCACTTCACTCTGACCATTAACAGCCTCCAG |
| | | TCCGAGGATTCAGCCACTTACTACTGTCAGCAGTCCTACAAGCGGGCC |
| | | AGCTTCGGACAGGGCACTAAGGTCGAGATCAAGACCACTACCCCAGCA |
| | | CCGAGGCCACCCACCCCGGCTCCTACCATCGCCTCCCAGCCTCTGTCC |
| | | CTGCGTCCGGAGGCATGTAGACCCGCAGCTGGTGGGGCCGTGCATACC |
| | | CGGGGTCTTGACTTCGCCTGCGATATCTACATTTGGGCCCCTCTGGCT |
| | | GGTACTTGCGGGGTCCTGCTGCTTTCACTCGTGATCACTCTTTACTGT |
| | | AAGCGCGGTCGGAAGAAGCTGCTGTACATCTTTAAGCAACCCTTCATG |
| | | AGGCCTGTGCAGACTACTCAAGAGGAGGACGGCTGTTCATGCCGGTTC |
| | | CCAGAGGAGGAGGAAGGCGGCTGCGAACTGCGCGTGAAATTCAGCCGC |
| | | AGCGCAGATGCTCCAGCCTACAAGCAGGGGCAGAACCAGCTCTACAAC |
| | | GAACTCAATCTTGGTCGGAGAGAGGAGTACGACGTGCTGGACAAGCGG |
| | | AGAGGACGGGACCCAGAAATGGGCGGGAAGCCGCGCAGAAAGAATCCC |
| | | CAAGAGGGCCTGTACAACGAGCTCCAAAAGGATAAGATGGCAGAAGCC |
| | | TATAGCGAGATTGGTATGAAAGGGGAACGCAGAAGAGGCAAAGGCCAC |
| | | GACGGACTGTACCAGGGACTCAGCACCGCCACCAAGGACACCTATGAC |
| | | GCTCTTCACATGCAGGCCCTGCCGCCTCGG |

139102

| | | |
|---|---|---|
| 139102-aa | 1003 | QVQLVQSGAEVKKPGASVKVSCKASGYTFSNYGITWVRQAPGQGLEWM |
| ScFv | | GWISAYNGNTNYAQKFQGRVTMTRNTSISTAYMELSSLRSEDTAVYYC |
| domain | | ARGPYYYYMDVWGKGTMVTVSSASGGGGSGGRASGGGGSEIVMTQSPL |
| | | SLPVTPGEPASISCRSSQSLLYSNGYNYVDWYLQKPGQSPQLLIYLGS |
| | | NRASGVPDRFSGSGSGTDFKLQISRVEAEDVGIYYCMQGRQFPYSFGQ |
| | | GTKVEIK |
| 139102-nt | 1004 | CAAGTCCAACTGGTCCAGAGCGGTGCAGAAGTGAAGAAGCCCGGAGCG |
| ScFv | | AGCGTGAAAGTGTCCTGCAAGGCTTCCGGGTACACCTTCTCCAACTAC |
| domain | | GGCATCACTTGGGTGCGCCAGGCCCCGGGACAGGGCCTGGAATGGATG |
| | | GGGTGGATTTCCGCGTACAACGGCAATACGAACTACGCTCAGAAGTTC |
| | | CAGGGTAGAGTGACCATGACTAGGAACACCTCCATTTCCACCGCCTAC |
| | | ATGGAACTGTCCTCCCTGCGGAGCGAGGACACCGCCGTGTACTATTGC |
| | | GCCCGGGGACCATACTACTACTACATGGATGTCTGGGGGAAGGGGACT |
| | | ATGGTCACCGTGTCATCCGCCTCGGGAGGCGGCGGATCAGGAGGACGC |
| | | GCCTCTGGTGGTGGAGGATCGGAGATCGTGATGACCCAGAGCCCTCTC |
| | | TCCTTGCCCGTGACTCCTGGGGAGCCCGCATCCATTTCATGCCGGAGC |
| | | TCCCAGTCACTTCTCTACTCCAACGGCTATAACTACGTGGATTGGTAC |
| | | CTCCAAAAGCCGGGCCAGAGCCCGCAGCTGCTGATCTACCTGGGCTCG |
| | | AACAGGGCCAGCGGAGTGCCTGACCGGTTCTCCGGGTCGGGAAGCGGG |
| | | ACCGACTTCAAGCTGCAAATCTCGAGAGTGGAGGCCGAGGACGTGGGA |
| | | ATCTACTACTGTATGCAGGGCCGCCAGTTTCCGTACTCGTTCGGACAG |
| | | GGCACCAAAGTGGAAATCAAG |
| 139102-aa | 1005 | QVQLVQSGAEVKKPGASVKVSCKASGYTFSNYGITWVRQAPGQGLEWM |
| VH | | GWISAYNGNTNYAQKFQGRVTMTRNTSISTAYMELSSLRSEDTAVYYC |
| | | ARGPYYYYMDVWGKGTMVTVSS |
| 139102-aa | 1006 | EIVMTQSPLSLPVTPGEPASISCRSSQSLLYSNGYNYVDWYLQKPGQS |
| VL | | PQLLIYLGSNRASGVPDRFSGSGSGTDFKLQISRVEAEDVGIYYCMQG |
| | | RQFPYSFGQGTKVEIK |
| 139102-aa | 1007 | MALPVTALLLPLALLLHAARPQVQLVQSGAEVKKPGASVKVSCKASGY |
| Full CAR | | TFSNYGITWVRQAPGQGLEWMGWISAYNGNTNYAQKFQGRVTMTRNTS |
| | | ISTAYMELSSLRSEDTAVYYCARGPYYYYMDVWGKGTMVTVSSASGGG |
| | | GSGGRASGGGGSEIVMTQSPLSLPVTPGEPASISCRSSQSLLYSNGYN |
| | | YVDWYLQKPGQSPQLLIYLGSNRASGVPDRFSGSGSGTDFKLQISRVE |
| | | AEDVGIYYCMQGRQFPYSFGQGTKVEIKTTTPAPRPPTPAPTIASQPL |
| | | SLRPEACRPAAGGAVHTRGLDFACDIYIWAPLAGTCGVLLLSLVITLY |
| | | CKRGRKKLLYIFKQPFMRPVQTTQEEDGCSCRFPEEEEGGCELRVKFS |
| | | RSADAPAYKQGQNQLYNELNLGRREEYDVLDKRRGRDPEMGGKPRRKN |
| | | PQEGLYNELQKDKMAEAYSEIGMKGERRRGKGHDGLYQGLSTATKDTY |
| | | DALHMQALPPR |
| 139102-nt | 1008 | ATGGCCCTCCCTGTCACCGCCCTGCTGCTTCCGCTGGCTCTTCTGCTC |
| Full CAR | | CACGCCGCTCGGCCCCAAGTCCAACTGGTCCAGAGCGGTGCAGAAGTG |
| | | AAGAAGCCCGGAGCGAGCGTGAAAGTGTCCTGCAAGGCTTCCGGGTAC |
| | | ACCTTCTCCAACTACGGCATCACTTGGGTGCGCCAGGCCCCGGGACAG |
| | | GGCCTGGAATGGATGGGGTGGATTTCCGCGTACAACGGCAATACGAAC |
| | | TACGCTCAGAAGTTCCAGGGTAGAGTGACCATGACTAGGAACACCTCC |
| | | ATTTCCACCGCCTACATGGAACTGTCCTCCCTGCGGAGCGAGGACACC |
| | | GCCGTGTACTATTGCGCCCGGGGACCATACTACTACTACATGGATGTC |
| | | TGGGGGAAGGGGACTATGGTCACCGTGTCATCCGCCTCGGGAGGCGGC |
| | | GGATCAGGAGGACGCGCCTCTGGTGGTGGAGGATCGGAGATCGTGATG |
| | | ACCCAGAGCCCTCTCTCCTTGCCCGTGACTCCTGGGGAGCCCGCATCC |
| | | ATTTCATGCCGGAGCTCCCAGTCACTTCTCTACTCCAACGGCTATAAC |
| | | TACGTGGATTGGTACCTCCAAAAGCCGGGCCAGAGCCCGCAGCTGCTG |
| | | ATCTACCTGGGCTCGAACAGGGCCAGCGGAGTGCCTGACCGGTTCTCC |
| | | GGGTCGGGAAGCGGGACCGACTTCAAGCTGCAAATCTCGAGAGTGGAG |
| | | GCCGAGGACGTGGGAATCTACTACTGTATGCAGGGCCGCCAGTTTCCG |
| | | TACTCGTTCGGACAGGGCACCAAAGTGGAAATCAAGACCACTACCCCA |
| | | GCACCGAGGCCACCCACCCCGGCTCCTACCATCGCCTCCCAGCCTCTG |
| | | TCCCTGCGTCCGGAGGCATGTAGACCCGCAGCTGGTGGGGCCGTGCAT |
| | | ACCCGGGGTCTTGACTTCGCCTGCGATATCTACATTTGGGCCCCTCTG |
| | | GCTGGTACTTGCGGGGTCCTGCTGCTTTCACTCGTGATCACTCTTTAC |
| | | TGTAAGCGCGGTCGGAAGAAGCTGCTGTACATCTTTAAGCAACCCTTC |
| | | ATGAGGCCTGTGCAGACTACTCAAGAGGAGGACGGCTGTTCATGCCGG |
| | | TTCCCAGAGGAGGAGGAAGGCGGCTGCGAACTGCGCGTGAAATTCAGC |
| | | CGCAGCGCAGATGCTCCAGCCTACAAGCAGGGGCAGAACCAGCTCTAC |
| | | AACGAACTCAATCTTGGTCGGAGAGAGGAGTACGACGTGCTGGACAAG |
| | | CGGAGAGGACGGGACCCAGAAATGGGCGGGAAGCCGCGCAGAAAGAAT |
| | | CCCCAAGAGGGCCTGTACAACGAGCTCCAAAAGGATAAGATGGCAGAA |
| | | GCCTATAGCGAGATTGGTATGAAAGGGGAACGCAGAAGAGGCAAAGGC |
| | | CACGACGGACTGTACCAGGGACTCAGCACCGCCACCAAGGACACCTAT |
| | | GACGCTCTTCACATGCAGGCCCTGCCGCCTCGG |

139104

| | | |
|---|---|---|
| 139104-aa | 1009 | EVQLLETGGGLVQPGGSLRLSCAVSGFALSNHGMSWVRRAPGKGLEWV |
| ScFv | | SGIVYSGSTYYAASVKGRFTISRDNSRNTLYLQMNSLRPEDTAIYYCS |
| domain | | AHGGESDVWGQGTTVTVSSASGGGGSGGRASGGGGSEIVLTQSPATLS |
| | | VSPGESATLSCRASQSVSSNLAWYQQKPGQAPRLLIYGASTRASGIPD |
| | | RFSGSGSGTDFTLTISSLQAEDVAVYYCQQYGSSLTFGGGTKVEIK |
| 139104-nt | 1010 | GAAGTGCAATTGCTCGAAACTGGAGGAGGTCTGGTGCAACCTGGAGGA |
| ScFv | | TCACTTCGCCTGTCCTGCGCCGTGTCGGGCTTTGCCCTGTCCAACCAT |
| domain | | GGAATGAGCTGGGTCCGCCGCGCGCCGGGGAAGGGCCTCGAATGGGTG |
| | | TCCGGCATCGTCTACTCCGGCTCCACCTACTACGCCGCGTCCGTGAAG |
| | | GGCCGGTTCACGATTTCACGGGACAACTCGCGGAACACCCTGTACCTC |
| | | CAAATGAATTCCCTTCGGCCGGAGGATACTGCCATCTACTACTGCTCC |
| | | GCCCACGGTGGCGAATCCGACGTCTGGGGCCAGGGAACCACCGTGACC |
| | | GTGTCCAGCGCGTCCGGGGGAGGAGGAAGCGGGGGTAGAGCATCGGGT |
| | | GGAGGCGGATCAGAGATCGTGCTGACCCAGTCCCCCGCCACCTTGAGC |
| | | GTGTCACCAGGAGAGTCCGCCACCCTGTCATGCCGCGCCAGCCAGTCC |
| | | GTGTCCTCCAACCTGGCTTGGTACCAGCAGAAGCCGGGGCAGGCCCCT |
| | | AGACTCCTGATCTATGGGGCGTCGACCCGGGCATCTGGAATTCCCGAT |
| | | AGGTTCAGCGGATCGGGCTCGGGCACTGACTTCACTCTGACCATCTCC |
| | | TCGCTGCAAGCCGAGGACGTGGCTGTGTACTACTGTCAGCAGTACGGA |
| | | AGCTCCCTGACTTTCGGTGGCGGGACCAAAGTCGAGATTAAG |
| 139104-aa | 1011 | EVQLLETGGGLVQPGGSLRLSCAVSGFALSNHGMSWVRRAPGKGLEWV |
| VH | | SGIVYSGSTYYAASVKGRFTISRDNSRNTLYLQMNSLRPEDTAIYYCS |
| | | AHGGESDVWGQGTTVTVSS |
| 139104-aa | 1012 | EIVLTQSPATLSVSPGESATLSCRASQSVSSNLAWYQQKPGQAPRLLI |
| VL | | YGASTRASGIPDRFSGSGSGTDFTLTISSLQAEDVAVYYCQQYGSSLT |
| | | FGGGTKVEIK |
| 139104-aa | 1013 | MALPVTALLLPLALLLHAARPEVQLLETGGGLVQPGGSLRLSCAVSGF |
| Full CAR | | ALSNHGMSWVRRAPGKGLEWVSGIVYSGSTYYAASVKGRFTISRDNSR |
| | | NTLYLQMNSLRPEDTAIYYCSAHGGESDVWGQGTTVTVSSASGGGGSG |
| | | GRASGGGGSEIVLTQSPATLSVSPGESATLSCRASQSVSSNLAWYQQK |
| | | PGQAPRLLIYGASTRASGIPDRFSGSGSGTDFTLTISSLQAEDVAVYY |
| | | CQQYGSSLTFGGGTKVEIKTTTPAPRPPTPAPTIASQPLSLRPEACRP |
| | | AAGGAVHTRGLDFACDIYIWAPLAGTCGVLLLSLVITLYCKRGRKKLL |
| | | YIFKQPFMRPVQTTQEEDGCSCRFPEEEEGGCELRVKFSRSADAPAYK |
| | | QGQNQLYNELNLGRREEYDVLDKRRGRDPEMGGKPRRKNPQEGLYNEL |
| | | QKDKMAEAYSEIGMKGERRRGKGHDGLYQGLSTATKDTYDALHMQALP |
| | | PR |
| 139104-nt | 1014 | ATGGCCCTCCCTGTCACCGCCCTGCTGCTTCCGCTGGCTCTTCTGCTC |
| Full CAR | | CACGCCGCTCGGCCCGAAGTGCAATTGCTCGAAACTGGAGGAGGTCTG |
| | | GTGCAACCTGGAGGATCACTTCGCCTGTCCTGCGCCGTGTCGGGCTTT |
| | | GCCCTGTCCAACCATGGAATGAGCTGGGTCCGCCGCGCGCCGGGGAAG |
| | | GGCCTCGAATGGGTGTCCGGCATCGTCTACTCCGGCTCCACCTACTAC |
| | | GCCGCGTCCGTGAAGGGCCGGTTCACGATTTCACGGGACAACTCGCGG |
| | | AACACCCTGTACCTCCAAATGAATTCCCTTCGGCCGGAGGATACTGCC |
| | | ATCTACTACTGCTCCGCCCACGGTGGCGAATCCGACGTCTGGGGCCAG |
| | | GGAACCACCGTGACCGTGTCCAGCGCGTCCGGGGGAGGAGGAAGCGGG |
| | | GGTAGAGCATCGGGTGGAGGCGGATCAGAGATCGTGCTGACCCAGTCC |
| | | CCCGCCACCTTGAGCGTGTCACCAGGAGAGTCCGCCACCCTGTCATGC |
| | | CGCGCCAGCCAGTCCGTGTCCTCCAACCTGGCTTGGTACCAGCAGAAG |
| | | CCGGGGCAGGCCCCTAGACTCCTGATCTATGGGGCGTCGACCCGGGCA |
| | | TCTGGAATTCCCGATAGGTTCAGCGGATCGGGCTCGGGCACTGACTTC |
| | | ACTCTGACCATCTCCTCGCTGCAAGCCGAGGACGTGGCTGTGTACTAC |
| | | TGTCAGCAGTACGGAAGCTCCCTGACTTTCGGTGGCGGGACCAAAGTC |
| | | GAGATTAAGACCACTACCCCAGCACCGAGGCCACCCACCCCGGCTCCT |
| | | ACCATCGCCTCCCAGCCTCTGTCCCTGCGTCCGGAGGCATGTAGACCC |
| | | GCAGCTGGTGGGGCCGTGCATACCCGGGGTCTTGACTTCGCCTGCGAT |
| | | ATCTACATTTGGGCCCCTCTGGCTGGTACTTGCGGGGTCCTGCTGCTT |
| | | TCACTCGTGATCACTCTTTACTGTAAGCGCGGTCGGAAGAAGCTGCTG |
| | | TACATCTTTAAGCAACCCTTCATGAGGCCTGTGCAGACTACTCAAGAG |
| | | GAGGACGGCTGTTCATGCCGGTTCCCAGAGGAGGAGGAAGGCGGCTGC |
| | | GAACTGCGCGTGAAATTCAGCCGCAGCGCAGATGCTCCAGCCTACAAG |
| | | CAGGGGCAGAACCAGCTCTACAACGAACTCAATCTTGGTCGGAGAGAG |
| | | GAGTACGACGTGCTGGACAAGCGGAGAGGACGGGACCCAGAAATGGGC |
| | | GGGAAGCCGCGCAGAAAGAATCCCCAAGAGGGCCTGTACAACGAGCTC |
| | | CAAAAGGATAAGATGGCAGAAGCCTATAGCGAGATTGGTATGAAAGGG |
| | | GAACGCAGAAGAGGCAAAGGCCACGACGGACTGTACCAGGGACTCAGC |
| | | ACCGCCACCAAGGACACCTATGACGCTCTTCACATGCAGGCCCTGCCG |
| | | CCTCGG |

139106

| | | |
|---|---|---|
| 139106-aa | 1015 | EVQLVETGGGLVQPGGSLRLSCAVSGFALSNHGMSWVRRAPGKGLEWV |
| ScFv | | SGIVYSGSTYYAASVKGRFTISRDNSRNTLYLQMNSLRPEDTAIYYCS |
| domain | | AHGGESDVWGQGTTVTVSSASGGGGSGGRASGGGGSEIVMTQSPATLS |
| | | VSPGERATLSCRASQSVSSKLAWYQQKPGQAPRLLMYGASIRATGIPD |
| | | RFSGSGSGTEFTLTISSLEPEDFAVYYCQQYGSSSWTFGQGTKVEIK |
| 139106-nt | 1016 | GAAGTGCAATTGGTGGAAACTGGAGGAGGACTTGTGCAACCTGGAGGA |
| ScFv | | TCATTGAGACTGAGCTGCGCAGTGTCGGGATTCGCCCTGAGCAACCAT |
| domain | | GGAATGTCCTGGGTCAGAAGGGCCCCTGGAAAAGGCCTCGAATGGGTG |
| | | TCAGGGATCGTGTACTCCGGTTCCACTTACTACGCCGCCTCCGTGAAG |
| | | GGGCGCTTCACTATCTCACGGGATAACTCCCGCAATACCCTGTACCTC |
| | | CAAATGAACAGCCTGCGGCCGGAGGATACCGCCATCTACTACTGTTCC |
| | | GCCCACGGTGGAGAGTCTGACGTCTGGGGCCAGGGAACTACCGTGACC |
| | | GTGTCCTCCGCGTCCGGCGGTGGAGGGAGCGGCGGCCGCGCCAGCGGC |
| | | GGCGGAGGCTCCGAGATCGTGATGACCCAGAGCCCCGCTACTCTGTCG |
| | | GTGTCGCCCGGAGAAAGGGCGACCCTGTCCTGCCGGGCGTCGCAGTCC |
| | | GTGAGCAGCAAGCTGGCTTGGTACCAGCAGAAGCCGGGCCAGGCACCA |
| | | CGCCTGCTTATGTACGGTGCCTCCATTCGGGCCACCGGAATCCCGGAC |
| | | CGGTTCTCGGGGTCGGGGTCCGGTACCGAGTTCACACTGACCATTTCC |
| | | TCGCTCGAGCCCGAGGACTTTGCCGTCTATTACTGCCAGCAGTACGGC |
| | | TCCTCCTCATGGACGTTCGGCCAGGGGACCAAGGTCGAAATCAAG |
| 139106-aa | 1017 | EVQLVETGGGLVQPGGSLRLSCAVSGFALSNHGMSWVRRAPGKGLEWV |
| VH | | SGIVYSGSTYYAASVKGRFTISRDNSRNTLYLQMNSLRPEDTAIYYCS |
| | | AHGGESDVWGQGTTVTVSS |
| 139106-aa | 1018 | EIVMTQSPATLSVSPGERATLSCRASQSVSSKLAWYQQKPGQAPRLLM |
| VL | | YGASIRATGIPDRFSGSGSGTEFTLTISSLEPEDFAVYYCQQYGSSSW |
| | | TFGQGTKVEIK |
| 139106-aa | 1019 | MALPVTALLLPLALLLHAARPEVQLVETGGGLVQPGGSLRLSCAVSGF |
| Full CAR | | ALSNHGMSWVRRAPGKGLEWVSGIVYSGSTYYAASVKGRFTISRDNSR |
| | | NTLYLQMNSLRPEDTAIYYCSAHGGESDVWGQGTTVTVSSASGGGGSG |
| | | GRASGGGGSEIVMTQSPATLSVSPGERATLSCRASQSVSSKLAWYQQK |
| | | PGQAPRLLMYGASIRATGIPDRFSGSGSGTEFTLTISSLEPEDFAVYY |
| | | CQQYGSSSWTFGQGTKVEIKTTTPAPRPPTPAPTIASQPLSLRPEACR |
| | | PAAGGAVHTRGLDFACDIYIWAPLAGTCGVLLLSLVITLYCKRGRKKL |
| | | LYIFKQPFMRPVQTTQEEDGCSCRFPEEEEGGCELRVKFSRSADAPAY |
| | | KQGQNQLYNELNLGRREEYDVLDKRRGRDPEMGGKPRRKNPQEGLYNE |
| | | LQKDKMAEAYSEIGMKGERRRGKGHDGLYQGLSTATKDTYDALHMQAL |
| | | PPR |
| 139106-nt | 1020 | ATGGCCCTCCCTGTCACCGCCCTGCTGCTTCCGCTGGCTCTTCTGCTC |
| Full CAR | | CACGCCGCTCGGCCCGAAGTGCAATTGGTGGAAACTGGAGGAGGACTT |
| | | GTGCAACCTGGAGGATCATTGAGACTGAGCTGCGCAGTGTCGGGATTC |
| | | GCCCTGAGCAACCATGGAATGTCCTGGGTCAGAAGGGCCCCTGGAAAA |
| | | GGCCTCGAATGGGTGTCAGGGATCGTGTACTCCGGTTCCACTTACTAC |
| | | GCCGCCTCCGTGAAGGGGCGCTTCACTATCTCACGGGATAACTCCCGC |
| | | AATACCCTGTACCTCCAAATGAACAGCCTGCGGCCGGAGGATACCGCC |
| | | ATCTACTACTGTTCCGCCCACGGTGGAGAGTCTGACGTCTGGGGCCAG |
| | | GGAACTACCGTGACCGTGTCCTCCGCGTCCGGCGGTGGAGGGAGCGGC |
| | | GGCCGCGCCAGCGGCGGCGGAGGCTCCGAGATCGTGATGACCCAGAGC |
| | | CCCGCTACTCTGTCGGTGTCGCCCGGAGAAAGGGCGACCCTGTCCTGC |
| | | CGGGCGTCGCAGTCCGTGAGCAGCAAGCTGGCTTGGTACCAGCAGAAG |
| | | CCGGGCCAGGCACCACGCCTGCTTATGTACGGTGCCTCCATTCGGGCC |
| | | ACCGGAATCCCGGACCGGTTCTCGGGGTCGGGGTCCGGTACCGAGTTC |
| | | ACACTGACCATTTCCTCGCTCGAGCCCGAGGACTTTGCCGTCTATTAC |
| | | TGCCAGCAGTACGGCTCCTCCTCATGGACGTTCGGCCAGGGGACCAAG |
| | | GTCGAAATCAAGACCACTACCCCAGCACCGAGGCCACCCACCCCGGCT |
| | | CCTACCATCGCCTCCCAGCCTCTGTCCCTGCGTCCGGAGGCATGTAGA |
| | | CCCGCAGCTGGTGGGGCCGTGCATACCCGGGGTCTTGACTTCGCCTGC |
| | | GATATCTACATTTGGGCCCCTCTGGCTGGTACTTGCGGGGTCCTGCTG |
| | | CTTTCACTCGTGATCACTCTTTACTGTAAGCGCGGTCGGAAGAAGCTG |
| | | CTGTACATCTTTAAGCAACCCTTCATGAGGCCTGTGCAGACTACTCAA |
| | | GAGGAGGACGGCTGTTCATGCCGGTTCCCAGAGGAGGAGGAAGGCGGC |
| | | TGCGAACTGCGCGTGAAATTCAGCCGCAGCGCAGATGCTCCAGCCTAC |
| | | AAGCAGGGGCAGAACCAGCTCTACAACGAACTCAATCTTGGTCGGAGA |
| | | GAGGAGTACGACGTGCTGGACAAGCGGAGAGGACGGGACCCAGAAATG |
| | | GGCGGGAAGCCGCGCAGAAAGAATCCCCAAGAGGGCCTGTACAACGAG |
| | | CTCCAAAAGGATAAGATGGCAGAAGCCTATAGCGAGATTGGTATGAAA |
| | | GGGGAACGCAGAAGAGGCAAAGGCCACGACGGACTGTACCAGGGACTC |
| | | AGCACCGCCACCAAGGACACCTATGACGCTCTTCACATGCAGGCCCTG |
| | | CCGCCTCGG |

139107

| | | |
|---|---|---|
| 139107-aa | 1021 | EVQLVETGGGVVQPGGSLRLSCAVSGFALSNHGMSWVRRAPGKGLEWV |
| ScFv | | SGIVYSGSTYYAASVKGRFTISRDNSRNTLYLQMNSLRPEDTAIYYCS |
| domain | | AHGGESDVWGQGTTVTVSSASGGGGSGGRASGGGGSEIVLTQSPGTLS |
| | | LSPGERATLSCRASQSVGSTNLAWYQQKPGQAPRLLIYDASNRATGIP |
| | | DRFSGGGSGTDFTLTISRLEPEDFAVYYCQQYGSSPPWTFGQGTKVEI |
| | | K |
| 139107-nt | 1022 | GAAGTGCAATTGGTGGAGACTGGAGGAGGAGTGGTGCAACCTGGAGGA |
| ScFv | | AGCCTGAGACTGTCATGCGCGGTGTCGGGCTTCGCCCTCTCCAACCAC |
| domain | | GGAATGTCCTGGGTCCGCCGGGCCCCTGGGAAAGGACTTGAATGGGTG |
| | | TCCGGCATCGTGTACTCGGGTTCCACCTACTACGCGGCCTCAGTGAAG |
| | | GGCCGGTTTACTATTAGCCGCGACAACTCCAGAAACACACTGTACCTC |
| | | CAAATGAACTCGCTGCGGCCGGAAGATACCGCTATCTACTACTGCTCC |
| | | GCCCATGGGGGAGAGTCGGACGTCTGGGGACAGGGCACCACTGTCACT |
| | | GTGTCCAGCGCTTCCGGCGGTGGTGGAAGCGGGGGACGGGCCTCAGGA |
| | | GGCGGTGGCAGCGAGATTGTGCTGACCCAGTCCCCCGGGACCCTGAGC |
| | | CTGTCCCCGGGAGAAAGGGCCACCCTCTCCTGTCGGGCATCCCAGTCC |
| | | GTGGGGTCTACTAACCTTGCATGGTACCAGCAGAAGCCCGGCCAGGCC |
| | | CCTCGCCTGCTGATCTACGACGCGTCCAATAGAGCCACCGGCATCCCG |
| | | GATCGCTTCAGCGGAGGCGGATCGGGCACCGACTTCACCCTCACCATT |
| | | TCAAGGCTGGAACCGGAGGACTTCGCCGTGTACTACTGCCAGCAGTAT |
| | | GGTTCGTCCCCACCCTGGACGTTCGGCCAGGGGACTAAGGTCGAGATC |
| | | AAG |
| 139107-aa | 1023 | EVQLVETGGGVVQPGGSLRLSCAVSGFALSNHGMSWVRRAPGKGLEWV |
| VH | | SGIVYSGSTYYAASVKGRFTISRDNSRNTLYLQMNSLRPEDTAIYYCS |
| | | AHGGESDVWGQGTTVTVSS |
| 139107-aa | 1024 | EIVLTQSPGTLSLSPGERATLSCRASQSVGSTNLAWYQQKPGQAPRLL |
| VL | | IYDASNRATGIPDRFSGGGSGTDFTLTISRLEPEDFAVYYCQQYGSSP |
| | | PWTFGQGTKVEIK |
| 139107-aa | 1025 | MALPVTALLLPLALLLHAARPEVQLVETGGGVVQPGGSLRLSCAVSGF |
| Full CAR | | ALSNHGMSWVRRAPGKGLEWVSGIVYSGSTYYAASVKGRFTISRDNSR |
| | | NTLYLQMNSLRPEDTAIYYCSAHGGESDVWGQGTTVTVSSASGGGGSG |
| | | GRASGGGGSEIVLTQSPGTLSLSPGERATLSCRASQSVGSTNLAWYQQ |
| | | KPGQAPRLLIYDASNRATGIPDRFSGGGSGTDFTLTISRLEPEDFAVY |
| | | YCQQYGSSPPWTFGQGTKVEIKTTTPAPRPPTPAPTIASQPLSLRPEA |
| | | CRPAAGGAVHTRGLDFACDIYIWAPLAGTCGVLLLSLVITLYCKRGRK |
| | | KLLYIFKQPFMRPVQTTQEEDGCSCRFPEEEEGGCELRVKFSRSADAP |
| | | AYKQGQNQLYNELNLGRREEYDVLDKRRGRDPEMGGKPRRKNPQEGLY |
| | | NELQKDKMAEAYSEIGMKGERRRGKGHDGLYQGLSTATKDTYDALHMQ |
| | | ALPPR |
| 139107-nt | 1026 | ATGGCCCTCCCTGTCACCGCCCTGCTGCTTCCGCTGGCTCTTCTGCTC |
| Full CAR | | CACGCCGCTCGGCCCGAAGTGCAATTGGTGGAGACTGGAGGAGGAGTG |
| | | GTGCAACCTGGAGGAAGCCTGAGACTGTCATGCGCGGTGTCGGGCTTC |
| | | GCCCTCTCCAACCACGGAATGTCCTGGGTCCGCCGGGCCCCTGGGAAA |
| | | GGACTTGAATGGGTGTCCGGCATCGTGTACTCGGGTTCCACCTACTAC |
| | | GCGGCCTCAGTGAAGGGCCGGTTTACTATTAGCCGCGACAACTCCAGA |
| | | AACACACTGTACCTCCAAATGAACTCGCTGCGGCCGGAAGATACCGCT |
| | | ATCTACTACTGCTCCGCCCATGGGGGAGAGTCGGACGTCTGGGGACAG |
| | | GGCACCACTGTCACTGTGTCCAGCGCTTCCGGCGGTGGTGGAAGCGGG |
| | | GGACGGGCCTCAGGAGGCGGTGGCAGCGAGATTGTGCTGACCCAGTCC |
| | | CCCGGGACCCTGAGCCTGTCCCCGGGAGAAAGGGCCACCCTCTCCTGT |
| | | CGGGCATCCCAGTCCGTGGGGTCTACTAACCTTGCATGGTACCAGCAG |
| | | AAGCCCGGCCAGGCCCCTCGCCTGCTGATCTACGACGCGTCCAATAGA |
| | | GCCACCGGCATCCCGGATCGCTTCAGCGGAGGCGGATCGGGCACCGAC |
| | | TTCACCCTCACCATTTCAAGGCTGGAACCGGAGGACTTCGCCGTGTAC |
| | | TACTGCCAGCAGTATGGTTCGTCCCCACCCTGGACGTTCGGCCAGGGG |
| | | ACTAAGGTCGAGATCAAGACCACTACCCCAGCACCGAGGCCACCCACC |
| | | CCGGCTCCTACCATCGCCTCCCAGCCTCTGTCCCTGCGTCCGGAGGCA |
| | | TGTAGACCCGCAGCTGGTGGGGCCGTGCATACCCGGGGTCTTGACTTC |
| | | GCCTGCGATATCTACATTTGGGCCCCTCTGGCTGGTACTTGCGGGGTC |
| | | CTGCTGCTTTCACTCGTGATCACTCTTTACTGTAAGCGCGGTCGGAAG |
| | | AAGCTGCTGTACATCTTTAAGCAACCCTTCATGAGGCCTGTGCAGACT |
| | | ACTCAAGAGGAGGACGGCTGTTCATGCCGGTTCCCAGAGGAGGAGGAA |
| | | GGCGGCTGCGAACTGCGCGTGAAATTCAGCCGCAGCGCAGATGCTCCA |
| | | GCCTACAAGCAGGGGCAGAACCAGCTCTACAACGAACTCAATCTTGGT |
| | | CGGAGAGAGGAGTACGACGTGCTGGACAAGCGGAGAGGACGGGACCCA |
| | | GAAATGGGCGGGAAGCCGCGCAGAAAGAATCCCCAAGAGGGCCTGTAC |
| | | AACGAGCTCCAAAAGGATAAGATGGCAGAAGCCTATAGCGAGATTGGT |
| | | ATGAAAGGGGAACGCAGAAGAGGCAAAGGCCACGACGGACTGTACCAG |
| | | GGACTCAGCACCGCCACCAAGGACACCTATGACGCTCTTCACATGCAG |
| | | GCCCTGCCGCCTCGG |

139108

| | | |
|---|---|---|
| 139108-aa | 1027 | QVQLVESGGGLVKPGGSLRLSCAASGFTFSDYYMSWIRQAPGKGLEWV |
| ScFv | | SYISSSGSTIYYADSVKGRFTISRDNAKNSLYLQMNSLRAEDTAVYYC |
| domain | | ARESGDGMDVWGQGTTVTVSSASGGGGSGGRASGGGGSDIQMTQSPSS |
| | | LSASVGDRVTITCRASQSISSYLNWYQQKPGKAPKLLIYAASSLQSGV |
| | | PSRFSGSGSGTDFTLTISSLQPEDFATYYCQQSYTLAFGQGTKVDIK |
| 139108-nt | 1028 | CAAGTGCAACTCGTGGAATCTGGTGGAGGACTCGTGAAACCTGGAGGA |
| ScFv | | TCATTGAGACTGTCATGCGCGGCCTCGGGATTCACGTTCTCCGATTAC |
| domain | | TACATGAGCTGGATTCGCCAGGCTCCGGGGAAGGGACTGGAATGGGTG |
| | | TCCTACATTTCCTCATCCGGCTCCACCATCTACTACGCGGACTCCGTG |
| | | AAGGGGAGATTCACCATTAGCCGCGATAACGCCAAGAACAGCCTGTAC |
| | | CTTCAGATGAACTCCCTGCGGGCTGAAGATACTGCCGTCTACTACTGC |
| | | GCAAGGGAGAGCGGAGATGGGATGGACGTCTGGGGACAGGGTACCACT |
| | | GTGACCGTGTCGTCGGCCTCCGGCGGAGGGGGTTCGGGTGGAAGGGCC |
| | | AGCGGCGGCGGAGGCAGCGACATCCAGATGACCCAGTCCCCCTCATCG |
| | | CTGTCCGCCTCCGTGGGCGACCGCGTCACCATCACATGCCGGGCCTCA |
| | | CAGTCGATCTCCTCCTACCTCAATTGGTATCAGCAGAAGCCCGGAAAG |
| | | GCCCCTAAGCTTCTGATCTACGCAGCGTCCTCCCTGCAATCCGGGGTC |
| | | CCATCTCGGTTCTCCGGCTCGGGCAGCGGTACCGACTTCACTCTGACC |
| | | ATCTCGAGCCTGCAGCCGGAGGACTTCGCCACTTACTACTGTCAGCAA |
| | | AGCTACACCCTCGCGTTTGGCCAGGGCACCAAAGTGGACATCAAG |
| 139108-aa | 1029 | QVQLVESGGGLVKPGGSLRLSCAASGFTFSDYYMSWIRQAPGKGLEWV |
| VH | | SYISSSGSTIYYADSVKGRFTISRDNAKNSLYLQMNSLRAEDTAVYYC |
| | | ARESGDGMDVWGQGTTVTVSS |
| 139108-aa | 1030 | DIQMTQSPSSLSASVGDRVTITCRASQSISSYLNWYQQKPGKAPKLLI |
| VL | | YAASSLQSGVPSRFSGSGSGTDFTLTISSLQPEDFATYYCQQSYTLAF |
| | | GQGTKVDIK |
| 139108-aa | 1031 | MALPVTALLLPLALLLHAARPQVQLVESGGGLVKPGGSLRLSCAASGF |
| Full CAR | | TFSDYYMSWIRQAPGKGLEWVSYISSSGSTIYYADSVKGRFTISRDNA |
| | | KNSLYLQMNSLRAEDTAVYYCARESGDGMDVWGQGTTVTVSSASGGGG |
| | | SGGRASGGGGSDIQMTQSPSSLSASVGDRVTITCRASQSISSYLNWYQ |
| | | QKPGKAPKLLIYAASSLQSGVPSRFSGSGSGTDFTLTISSLQPEDFAT |
| | | YYCQQSYTLAFGQGTKVDIKTTTPAPRPPTPAPTIASQPLSLRPEACR |
| | | PAAGGAVHTRGLDFACDIYIWAPLAGTCGVLLLSLVITLYCKRGRKKL |
| | | LYIFKQPFMRPVQTTQEEDGCSCRFPEEEEGGCELRVKFSRSADAPAY |
| | | KQGQNQLYNELNLGRREEYDVLDKRRGRDPEMGGKPRRKNPQEGLYNE |
| | | LQKDKMAEAYSEIGMKGERRRGKGHDGLYQGLSTATKDTYDALHMQAL |
| | | PPR |
| 139108-nt | 1032 | ATGGCCCTCCCTGTCACCGCCCTGCTGCTTCCGCTGGCTCTTCTGCTC |
| Full CAR | | CACGCCGCTCGGCCCCAAGTGCAACTCGTGGAATCTGGTGGAGGACTC |
| | | GTGAAACCTGGAGGATCATTGAGACTGTCATGCGCGGCCTCGGGATTC |
| | | ACGTTCTCCGATTACTACATGAGCTGGATTCGCCAGGCTCCGGGGAAG |
| | | GGACTGGAATGGGTGTCCTACATTTCCTCATCCGGCTCCACCATCTAC |
| | | TACGCGGACTCCGTGAAGGGGAGATTCACCATTAGCCGCGATAACGCC |
| | | AAGAACAGCCTGTACCTTCAGATGAACTCCCTGCGGGCTGAAGATACT |
| | | GCCGTCTACTACTGCGCAAGGGAGAGCGGAGATGGGATGGACGTCTGG |
| | | GGACAGGGTACCACTGTGACCGTGTCGTCGGCCTCCGGCGGAGGGGGT |
| | | TCGGGTGGAAGGGCCAGCGGCGGCGGAGGCAGCGACATCCAGATGACC |
| | | CAGTCCCCCTCATCGCTGTCCGCCTCCGTGGGCGACCGCGTCACCATC |
| | | ACATGCCGGGCCTCACAGTCGATCTCCTCCTACCTCAATTGGTATCAG |
| | | CAGAAGCCCGGAAAGGCCCCTAAGCTTCTGATCTACGCAGCGTCCTCC |
| | | CTGCAATCCGGGGTCCCATCTCGGTTCTCCGGCTCGGGCAGCGGTACC |
| | | GACTTCACTCTGACCATCTCGAGCCTGCAGCCGGAGGACTTCGCCACT |
| | | TACTACTGTCAGCAAAGCTACACCCTCGCGTTTGGCCAGGGCACCAAA |
| | | GTGGACATCAAGACCACTACCCCAGCACCGAGGCCACCCACCCCGGCT |
| | | CCTACCATCGCCTCCCAGCCTCTGTCCCTGCGTCCGGAGGCATGTAGA |
| | | CCCGCAGCTGGTGGGGCCGTGCATACCCGGGGTCTTGACTTCGCCTGC |
| | | GATATCTACATTTGGGCCCCTCTGGCTGGTACTTGCGGGGTCCTGCTG |
| | | CTTTCACTCGTGATCACTCTTTACTGTAAGCGCGGTCGGAAGAAGCTG |
| | | CTGTACATCTTTAAGCAACCCTTCATGAGGCCTGTGCAGACTACTCAA |
| | | GAGGAGGACGGCTGTTCATGCCGGTTCCCAGAGGAGGAGGAAGGCGGC |
| | | TGCGAACTGCGCGTGAAATTCAGCCGCAGCGCAGATGCTCCAGCCTAC |
| | | AAGCAGGGGCAGAACCAGCTCTACAACGAACTCAATCTTGGTCGGAGA |
| | | GAGGAGTACGACGTGCTGGACAAGCGGAGAGGACGGGACCCAGAAATG |
| | | GGCGGGAAGCCGCGCAGAAAGAATCCCCAAGAGGGCCTGTACAACGAG |
| | | CTCCAAAAGGATAAGATGGCAGAAGCCTATAGCGAGATTGGTATGAAA |
| | | GGGGAACGCAGAAGAGGCAAAGGCCACGACGGACTGTACCAGGGACTC |
| | | AGCACCGCCACCAAGGACACCTATGACGCTCTTCACATGCAGGCCCTG |
| | | CCGCCTCGG |

139110

| | | |
|---|---|---|
| 139110-aa | 1033 | QVQLVQSGGGLVKPGGSLRLSCAASGFTFSDYYMSWIRQAPGKGLEWV |
| ScFv | | SYISSSGNTIYYADSVKGRFTISRDNAKNSLYLQMNSLRAEDTAVYYC |
| domain | | ARSTMVREDYWGQGTLVTVSSASGGGGSGGRASGGGGSDIVLTQSPLS |
| | | LPVTLGQPASISCKSSESLVHNSGKTYLNWFHQRPGQSPRRLIYEVSN |
| | | RDSGVPDRFTGSGSGTDFTLKISRVEAEDVGVYYCMQGTHWPGTFGQG |
| | | TKLEIK |
| 139110-nt | 1034 | CAAGTGCAACTGGTGCAAAGCGGAGGAGGATTGGTCAAACCCGGAGGA |
| ScFv | | AGCCTGAGACTGTCATGCGCGGCCTCTGGATTCACCTTCTCCGATTAC |
| domain | | TACATGTCATGGATCAGACAGGCCCCGGGGAAGGGCCTCGAATGGGTG |
| | | TCCTACATCTCGTCCTCCGGGAACACCATCTACTACGCCGACAGCGTG |
| | | AAGGGCCGCTTTACCATTTCCCGCGACAACGCAAAGAACTCGCTGTAC |
| | | CTTCAGATGAATTCCCTGCGGGCTGAAGATACCGCGGTGTACTATTGC |
| | | GCCCGGTCCACTATGGTCCGGGAGGACTACTGGGGACAGGGCACACTC |
| | | GTGACCGTGTCCAGCGCGAGCGGGGGTGGAGGCAGCGGTGGACGCGCC |
| | | TCCGGCGGCGGCGGTTCAGACATCGTGCTGACTCAGTCGCCCCTGTCG |
| | | CTGCCGGTCACCCTGGGCCAACCGGCCTCAATTAGCTGCAAGTCCTCG |
| | | GAGAGCCTGGTGCACAACTCAGGAAAGACTTACCTGAACTGGTTCCAT |
| | | CAGCGGCCTGGACAGTCCCCACGGAGGCTCATCTATGAAGTGTCCAAC |
| | | AGGGATTCGGGGGTGCCCGACCGCTTCACTGGCTCCGGGTCCGGCACC |
| | | GACTTCACCTTGAAAATCTCCAGAGTGGAAGCCGAGGACGTGGGCGTG |
| | | TACTACTGTATGCAGGGTACCCACTGGCCTGGAACCTTTGGACAAGGA |
| | | ACTAAGCTCGAGATTAAG |
| 139110-aa | 1035 | QVQLVQSGGGLVKPGGSLRLSCAASGFTFSDYYMSWIRQAPGKGLEWV |
| VH | | SYISSSGNTIYYADSVKGRFTISRDNAKNSLYLQMNSLRAEDTAVYYC |
| | | ARSTMVREDYWGQGTLVTVSS |
| 139110-aa | 1036 | DIVLTQSPLSLPVTLGQPASISCKSSESLVHNSGKTYLNWFHQRPGQS |
| VL | | PRRLIYEVSNRDSGVPDRFTGSGSGTDFTLKISRVEAEDVGVYYCMQG |
| | | THWPGTFGQGTKLEIK |
| 139110-aa | 1037 | MALPVTALLLPLALLLHAARPQVQLVQSGGGLVKPGGSLRLSCAASGF |
| Full CAR | | TFSDYYMSWIRQAPGKGLEWVSYISSSGNTIYYADSVKGRFTISRDNA |
| | | KNSLYLQMNSLRAEDTAVYYCARSTMVREDYWGQGTLVTVSSASGGGG |
| | | SGGRASGGGGSDIVLTQSPLSLPVTLGQPASISCKSSESLVHNSGKTY |
| | | LNWFHQRPGQSPRRLIYEVSNRDSGVPDRFTGSGSGTDFTLKISRVEA |
| | | EDVGVYYCMQGTHWPGTFGQGTKLEIKTTTPAPRPPTPAPTIASQPLS |
| | | LRPEACRPAAGGAVHTRGLDFACDIYIWAPLAGTCGVLLLSLVITLYC |
| | | KRGRKKLLYIFKQPFMRPVQTTQEEDGCSCRFPEEEEGGCELRVKFSR |
| | | SADAPAYKQGQNQLYNELNLGRREEYDVLDKRRGRDPEMGGKPRRKNP |
| | | QEGLYNELQKDKMAEAYSEIGMKGERRRGKGHDGLYQGLSTATKDTYD |
| | | ALHMQALPPR |
| 139110-nt | 1038 | ATGGCCCTCCCTGTCACCGCCCTGCTGCTTCCGCTGGCTCTTCTGCTC |
| Full CAR | | CACGCCGCTCGGCCCCAAGTGCAACTGGTGCAAAGCGGAGGAGGATTG |
| | | GTCAAACCCGGAGGAAGCCTGAGACTGTCATGCGCGGCCTCTGGATTC |
| | | ACCTTCTCCGATTACTACATGTCATGGATCAGACAGGCCCCGGGGAAG |
| | | GGCCTCGAATGGGTGTCCTACATCTCGTCCTCCGGGAACACCATCTAC |
| | | TACGCCGACAGCGTGAAGGGCCGCTTTACCATTTCCCGCGACAACGCA |
| | | AAGAACTCGCTGTACCTTCAGATGAATTCCCTGCGGGCTGAAGATACC |
| | | GCGGTGTACTATTGCGCCCGGTCCACTATGGTCCGGGAGGACTACTGG |
| | | GGACAGGGCACACTCGTGACCGTGTCCAGCGCGAGCGGGGGTGGAGGC |
| | | AGCGGTGGACGCGCCTCCGGCGGCGGCGGTTCAGACATCGTGCTGACT |
| | | CAGTCGCCCCTGTCGCTGCCGGTCACCCTGGGCCAACCGGCCTCAATT |
| | | AGCTGCAAGTCCTCGGAGAGCCTGGTGCACAACTCAGGAAAGACTTAC |
| | | CTGAACTGGTTCCATCAGCGGCCTGGACAGTCCCCACGGAGGCTCATC |
| | | TATGAAGTGTCCAACAGGGATTCGGGGGTGCCCGACCGCTTCACTGGC |
| | | TCCGGGTCCGGCACCGACTTCACCTTGAAAATCTCCAGAGTGGAAGCC |
| | | GAGGACGTGGGCGTGTACTACTGTATGCAGGGTACCCACTGGCCTGGA |
| | | ACCTTTGGACAAGGAACTAAGCTCGAGATTAAGACCACTACCCCAGCA |
| | | CCGAGGCCACCCACCCCGGCTCCTACCATCGCCTCCCAGCCTCTGTCC |
| | | CTGCGTCCGGAGGCATGTAGACCCGCAGCTGGTGGGGCCGTGCATACC |
| | | CGGGGTCTTGACTTCGCCTGCGATATCTACATTTGGGCCCCTCTGGCT |
| | | GGTACTTGCGGGGTCCTGCTGCTTTCACTCGTGATCACTCTTTACTGT |
| | | AAGCGCGGTCGGAAGAAGCTGCTGTACATCTTTAAGCAACCCTTCATG |
| | | AGGCCTGTGCAGACTACTCAAGAGGAGGACGGCTGTTCATGCCGGTTC |
| | | CCAGAGGAGGAGGAAGGCGGCTGCGAACTGCGCGTGAAATTCAGCCGC |
| | | AGCGCAGATGCTCCAGCCTACAAGCAGGGGCAGAACCAGCTCTACAAC |
| | | GAACTCAATCTTGGTCGGAGAGAGGAGTACGACGTGCTGGACAAGCGG |
| | | AGAGGACGGGACCCAGAAATGGGCGGGAAGCCGCGCAGAAAGAATCCC |
| | | CAAGAGGGCCTGTACAACGAGCTCCAAAAGGATAAGATGGCAGAAGCC |
| | | TATAGCGAGATTGGTATGAAAGGGGAACGCAGAAGAGGCAAAGGCCAC |
| | | GACGGACTGTACCAGGGACTCAGCACCGCCACCAAGGACACCTATGAC |
| | | GCTCTTCACATGCAGGCCCTGCCGCCTCGG |

139112

| | | |
|---|---|---|
| 139112-aa | 1039 | QVQLVESGGGLVQPGGSLRLSCAVSGFALSNHGMSWVRRAPGKGLEWV |
| ScFv | | SGIVYSGSTYYAASVKGRFTISRDNSRNTLYLQMNSLRPEDTAIYYCS |
| domain | | AHGGESDVWGQGTTVTVSSASGGGGSGGRASGGGGSDIRLTQSPSPLS |
| | | ASVGDRVTITCQASEDINKFLNWYHQTPGKAPKLLIYDASTLQTGVPS |
| | | RFSGSGSGTDFTLTINSLQPEDIGTYYCQQYESLPLTFGGGTKVEIK |
| 139112-nt | 1040 | CAAGTGCAACTCGTGGAATCTGGTGGAGGACTCGTGCAACCCGGTGGA |
| ScFv | | AGCCTTAGGCTGTCGTGCGCCGTCAGCGGGTTTGCTCTGAGCAACCAT |
| domain | | GGAATGTCCTGGGTCCGCCGGGCACCGGGAAAAGGGCTGGAATGGGTG |
| | | TCCGGCATCGTGTACAGCGGGTCAACCTATTACGCCGCGTCCGTGAAG |
| | | GGCAGATTCACTATCTCAAGAGACAACAGCCGGAACACCCTGTACTTG |
| | | CAAATGAATTCCCTGCGCCCCGAGGACACCGCCATCTACTACTGCTCC |
| | | GCCCACGGAGGAGAGTCGGACGTGTGGGGCCAGGGAACGACTGTGACT |
| | | GTGTCCAGCGCATCAGGAGGGGGTGGTTCGGGCGGCCGGGCCTCGGGG |
| | | GGAGGAGGTTCCGACATTCGGCTGACCCAGTCCCCGTCCCCACTGTCG |
| | | GCCTCCGTCGGCGACCGCGTGACCATCACTTGTCAGGCGTCCGAGGAC |
| | | ATTAACAAGTTCCTGAACTGGTACCACCAGACCCCTGGAAAGGCCCCC |
| | | AAGCTGCTGATCTACGATGCCTCGACCCTTCAAACTGGAGTGCCTAGC |
| | | CGGTTCTCCGGGTCCGGCTCCGGCACTGATTTCACTCTGACCATCAAC |
| | | TCATTGCAGCCGGAAGATATCGGGACCTACTATTGCCAGCAGTACGAA |
| | | TCCCTCCCGCTCACATTCGGCGGGGGAACCAAGGTCGAGATTAAG |
| 139112-aa | 1041 | QVQLVESGGGLVQPGGSLRLSCAVSGFALSNHGMSWVRRAPGKGLEWV |
| VH | | SGIVYSGSTYYAASVKGRFTISRDNSRNTLYLQMNSLRPEDTAIYYCS |
| | | AHGGESDVWGQGTTVTVSS |
| 139112-aa | 1042 | DIRLTQSPSPLSASVGDRVTITCQASEDINKFLNWYHQTPGKAPKLLI |
| VL | | YDASTLQTGVPSRFSGSGSGTDFTLTINSLQPEDIGTYYCQQYESLPL |
| | | TFGGGTKVEIK |
| 139112-aa | 1043 | MALPVTALLLPLALLLHAARPQVQLVESGGGLVQPGGSLRLSCAVSGF |
| Full CAR | | ALSNHGMSWVRRAPGKGLEWVSGIVYSGSTYYAASVKGRFTISRDNSR |
| | | NTLYLQMNSLRPEDTAIYYCSAHGGESDVWGQGTTVTVSSASGGGGSG |
| | | GRASGGGGSDIRLTQSPSPLSASVGDRVTITCQASEDINKFLNWYHQT |
| | | PGKAPKLLIYDASTLQTGVPSRFSGSGSGTDFTLTINSLQPEDIGTYY |
| | | CQQYESLPLTFGGGTKVEIKTTTPAPRPPTPAPTIASQPLSLRPEACR |
| | | PAAGGAVHTRGLDFACDIYIWAPLAGTCGVLLLSLVITLYCKRGRKKL |
| | | LYIFKQPFMRPVQTTQEEDGCSCRFPEEEEGGCELRVKFSRSADAPAY |
| | | KQGQNQLYNELNLGRREEYDVLDKRRGRDPEMGGKPRRKNPQEGLYNE |
| | | LQKDKMAEAYSEIGMKGERRRGKGHDGLYQGLSTATKDTYDALHMQAL |
| | | PPR |
| 139112-nt | 1044 | ATGGCCCTCCCTGTCACCGCCCTGCTGCTTCCGCTGGCTCTTCTGCTC |
| Full CAR | | CACGCCGCTCGGCCCCAAGTGCAACTCGTGGAATCTGGTGGAGGACTC |
| | | GTGCAACCCGGTGGAAGCCTTAGGCTGTCGTGCGCCGTCAGCGGGTTT |
| | | GCTCTGAGCAACCATGGAATGTCCTGGGTCCGCCGGGCACCGGGAAAA |
| | | GGGCTGGAATGGGTGTCCGGCATCGTGTACAGCGGGTCAACCTATTAC |
| | | GCCGCGTCCGTGAAGGGCAGATTCACTATCTCAAGAGACAACAGCCGG |
| | | AACACCCTGTACTTGCAAATGAATTCCCTGCGCCCCGAGGACACCGCC |
| | | ATCTACTACTGCTCCGCCCACGGAGGAGAGTCGGACGTGTGGGGCCAG |
| | | GGAACGACTGTGACTGTGTCCAGCGCATCAGGAGGGGGTGGTTCGGGC |
| | | GGCCGGGCCTCGGGGGGAGGAGGTTCCGACATTCGGCTGACCCAGTCC |
| | | CCGTCCCCACTGTCGGCCTCCGTCGGCGACCGCGTGACCATCACTTGT |
| | | CAGGCGTCCGAGGACATTAACAAGTTCCTGAACTGGTACCACCAGACC |
| | | CCTGGAAAGGCCCCCAAGCTGCTGATCTACGATGCCTCGACCCTTCAA |
| | | ACTGGAGTGCCTAGCCGGTTCTCCGGGTCCGGCTCCGGCACTGATTTC |
| | | ACTCTGACCATCAACTCATTGCAGCCGGAAGATATCGGGACCTACTAT |
| | | TGCCAGCAGTACGAATCCCTCCCGCTCACATTCGGCGGGGGAACCAAG |
| | | GTCGAGATTAAGACCACTACCCCAGCACCGAGGCCACCCACCCCGGCT |
| | | CCTACCATCGCCTCCCAGCCTCTGTCCCTGCGTCCGGAGGCATGTAGA |
| | | CCCGCAGCTGGTGGGGCCGTGCATACCCGGGGTCTTGACTTCGCCTGC |
| | | GATATCTACATTTGGGCCCCTCTGGCTGGTACTTGCGGGGTCCTGCTG |
| | | CTTTCACTCGTGATCACTCTTTACTGTAAGCGCGGTCGGAAGAAGCTG |
| | | CTGTACATCTTTAAGCAACCCTTCATGAGGCCTGTGCAGACTACTCAA |
| | | GAGGAGGACGGCTGTTCATGCCGGTTCCCAGAGGAGGAGGAAGGCGGC |
| | | TGCGAACTGCGCGTGAAATTCAGCCGCAGCGCAGATGCTCCAGCCTAC |
| | | AAGCAGGGGCAGAACCAGCTCTACAACGAACTCAATCTTGGTCGGAGA |
| | | GAGGAGTACGACGTGCTGGACAAGCGGAGAGGACGGGACCCAGAAATG |
| | | GGCGGGAAGCCGCGCAGAAAGAATCCCCAAGAGGGCCTGTACAACGAG |
| | | CTCCAAAAGGATAAGATGGCAGAAGCCTATAGCGAGATTGGTATGAAA |
| | | GGGGAACGCAGAAGAGGCAAAGGCCACGACGGACTGTACCAGGGACTC |
| | | AGCACCGCCACCAAGGACACCTATGACGCTCTTCACATGCAGGCCCTG |
| | | CCGCCTCGG |

139113

| | | |
|---|---|---|
| 139113-aa | 1045 | EVQLVETGGGLVQPGGSLRLSCAVSGFALSNHGMSWVRRAPGKGLEWV |
| ScFv | | SGIVYSGSTYYAASVKGRFTISRDNSRNTLYLQMNSLRPEDTAIYYCS |
| domain | | AHGGESDVWGQGTTVTVSSASGGGGSGGRASGGGGSETTLTQSPATLS |
| | | VSPGERATLSCRASQSVGSNLAWYQQKPGQGPRLLIYGASTRATGIPA |
| | | RFSGSGSGTEFTLTISSLQPEDFAVYYCQQYNDWLPVTFGQGTKVEIK |
| 139113-nt | 1046 | GAAGTGCAATTGGTGGAAACTGGAGGAGGACTTGTGCAACCTGGAGGA |
| ScFv | | TCATTGCGGCTCTCATGCGCTGTCTCCGGCTTCGCCCTGTCAAATCAC |
| domain | | GGGATGTCGTGGGTCAGACGGGCCCCGGGAAAGGGTCTGGAATGGGTG |
| | | TCGGGGATTGTGTACAGCGGCTCCACCTACTACGCCGCTTCGGTCAAG |
| | | GGCCGCTTCACTATTTCACGGGACAACAGCCGCAACACCCTCTATCTG |
| | | CAAATGAACTCTCTCCGCCCGGAGGATACCGCCATCTACTACTGCTCC |
| | | GCACACGGCGGCGAATCCGACGTGTGGGGACAGGGAACCACTGTCACC |
| | | GTGTCGTCCGCATCCGGTGGCGGAGGATCGGGTGGCCGGGCCTCCGGG |
| | | GGCGGCGGCAGCGAGACTACCCTGACCCAGTCCCCTGCCACTCTGTCC |
| | | GTGAGCCCGGGAGAGAGAGCCACCCTTAGCTGCCGGGCCAGCCAGAGC |
| | | GTGGGCTCCAACCTGGCCTGGTACCAGCAGAAGCCAGGACAGGGTCCC |
| | | AGGCTGCTGATCTACGGAGCCTCCACTCGCGCGACCGGCATCCCCGCG |
| | | AGGTTCTCCGGGTCGGGTTCCGGGACCGAGTTCACCCTGACCATCTCC |
| | | TCCCTCCAACCGGAGGACTTCGCGGTGTACTACTGTCAGCAGTACAAC |
| | | GATTGGCTGCCCGTGACATTTGGACAGGGGACGAAGGTGGAAATCAAA |
| 139113-aa | 1047 | EVQLVETGGGLVQPGGSLRLSCAVSGFALSNHGMSWVRRAPGKGLEWV |
| VH | | SGIVYSGSTYYAASVKGRFTISRDNSRNTLYLQMNSLRPEDTAIYYCS |
| | | AHGGESDVWGQGTTVTVSS |
| 139113-aa | 1048 | ETTLTQSPATLSVSPGERATLSCRASQSVGSNLAWYQQKPGQGPRLLI |
| VL | | YGASTRATGIPARFSGSGSGTEFTLTISSLQPEDFAVYYCQQYNDWLP |
| | | VTFGQGTKVEIK |
| 139113-aa | 1049 | MALPVTALLLPLALLLHAARPEVQLVETGGGLVQPGGSLRLSCAVSGF |
| Full CAR | | ALSNHGMSWVRRAPGKGLEWVSGIVYSGSTYYAASVKGRFTISRDNSR |
| | | NTLYLQMNSLRPEDTAIYYCSAHGGESDVWGQGTTVTVSSASGGGGSG |
| | | GRASGGGGSETTLTQSPATLSVSPGERATLSCRASQSVGSNLAWYQQK |
| | | PGQGPRLLIYGASTRATGIPARFSGSGSGTEFTLTISSLQPEDFAVYY |
| | | CQQYNDWLPVTFGQGTKVEIKTTTPAPRPPTPAPTIASQPLSLRPEAC |
| | | RPAAGGAVHTRGLDFACDIYIWAPLAGTCGVLLLSLVITLYCKRGRKK |
| | | LLYIFKQPFMRPVQTTQEEDGCSCRFPEEEEGGCELRVKFSRSADAPA |
| | | YKQGQNQLYNELNLGRREEYDVLDKRRGRDPEMGGKPRRKNPQEGLYN |
| | | ELQKDKMAEAYSEIGMKGERRRGKGHDGLYQGLSTATKDTYDALHMQA |
| | | LPPR |
| 139113-nt | 1050 | ATGGCCCTCCCTGTCACCGCCCTGCTGCTTCCGCTGGCTCTTCTGCTC |
| Full CAR | | CACGCCGCTCGGCCCGAAGTGCAATTGGTGGAAACTGGAGGAGGACTT |
| | | GTGCAACCTGGAGGATCATTGCGGCTCTCATGCGCTGTCTCCGGCTTC |
| | | GCCCTGTCAAATCACGGGATGTCGTGGGTCAGACGGGCCCCGGGAAAG |
| | | GGTCTGGAATGGGTGTCGGGGATTGTGTACAGCGGCTCCACCTACTAC |
| | | GCCGCTTCGGTCAAGGGCCGCTTCACTATTTCACGGGACAACAGCCGC |
| | | AACACCCTCTATCTGCAAATGAACTCTCTCCGCCCGGAGGATACCGCC |
| | | ATCTACTACTGCTCCGCACACGGCGGCGAATCCGACGTGTGGGGACAG |
| | | GGAACCACTGTCACCGTGTCGTCCGCATCCGGTGGCGGAGGATCGGGT |
| | | GGCCGGGCCTCCGGGGGCGGCGGCAGCGAGACTACCCTGACCCAGTCC |
| | | CCTGCCACTCTGTCCGTGAGCCCGGGAGAGAGAGCCACCCTTAGCTGC |
| | | CGGGCCAGCCAGAGCGTGGGCTCCAACCTGGCCTGGTACCAGCAGAAG |
| | | CCAGGACAGGGTCCCAGGCTGCTGATCTACGGAGCCTCCACTCGCGCG |
| | | ACCGGCATCCCCGCGAGGTTCTCCGGGTCGGGTTCCGGGACCGAGTTC |
| | | ACCCTGACCATCTCCTCCCTCCAACCGGAGGACTTCGCGGTGTACTAC |
| | | TGTCAGCAGTACAACGATTGGCTGCCCGTGACATTTGGACAGGGGACG |
| | | AAGGTGGAAATCAAAACCACTACCCCAGCACCGAGGCCACCCACCCCG |
| | | GCTCCTACCATCGCCTCCCAGCCTCTGTCCCTGCGTCCGGAGGCATGT |
| | | AGACCCGCAGCTGGTGGGGCCGTGCATACCCGGGGTCTTGACTTCGCC |
| | | TGCGATATCTACATTTGGGCCCCTCTGGCTGGTACTTGCGGGGTCCTG |
| | | CTGCTTTCACTCGTGATCACTCTTTACTGTAAGCGCGGTCGGAAGAAG |
| | | CTGCTGTACATCTTTAAGCAACCCTTCATGAGGCCTGTGCAGACTACT |
| | | CAAGAGGAGGACGGCTGTTCATGCCGGTTCCCAGAGGAGGAGGAAGGC |
| | | GGCTGCGAACTGCGCGTGAAATTCAGCCGCAGCGCAGATGCTCCAGCC |
| | | TACAAGCAGGGGCAGAACCAGCTCTACAACGAACTCAATCTTGGTCGG |
| | | AGAGAGGAGTACGACGTGCTGGACAAGCGGAGAGGACGGGACCCAGAA |
| | | ATGGGCGGGAAGCCGCGCAGAAAGAATCCCCAAGAGGGCCTGTACAAC |
| | | GAGCTCCAAAAGGATAAGATGGCAGAAGCCTATAGCGAGATTGGTATG |
| | | AAAGGGGAACGCAGAAGAGGCAAAGGCCACGACGGACTGTACCAGGGA |
| | | CTCAGCACCGCCACCAAGGACACCTATGACGCTCTTCACATGCAGGCC |
| | | CTGCCGCCTCGG |

139114

| | | |
|---|---|---|
| 139114-aa | 1051 | EVQLVESGGGLVQPGGSLRLSCAVSGFALSNHGMSWVRRAPGKGLEWV |
| ScFv | | SGIVYSGSTYYAASVKGRFTISRDNSRNTLYLQMNSLRPEDTAIYYCS |
| domain | | AHGGESDVWGQGTTVTVSSASGGGGSGGRASGGGGSEIVLTQSPGTLS |
| | | LSPGERATLSCRASQSIGSSSLAWYQQKPGQAPRLLMYGASSRASGIP |
| | | DRFSGSGSGTDFTLTISRLEPEDFAVYYCQQYAGSPPFTFGQGTKVEI |
| | | K |
| 139114-nt | 1052 | GAAGTGCAATTGGTGGAATCTGGTGGAGGACTTGTGCAACCTGGAGGA |
| ScFv | | TCACTGAGACTGTCATGCGCGGTGTCCGGTTTTGCCCTGAGCAATCAT |
| domain | | GGGATGTCGTGGGTCCGGCGCGCCCCCGGAAAGGGTCTGGAATGGGTG |
| | | TCGGGTATCGTCTACTCCGGGAGCACTTACTACGCCGCGAGCGTGAAG |
| | | GGCCGCTTCACCATTTCCCGCGATAACTCCCGCAACACCCTGTACTTG |
| | | CAAATGAACTCGCTCCGGCCTGAGGACACTGCCATCTACTACTGCTCC |
| | | GCACACGGAGGAGAATCCGACGTGTGGGGCCAGGGAACTACCGTGACC |
| | | GTCAGCAGCGCCTCCGGCGGCGGGGGCTCAGGCGGACGGGCTAGCGGC |
| | | GGCGGTGGCTCCGAGATCGTGCTGACCCAGTCGCCTGGCACTCTCTCG |
| | | CTGAGCCCCGGGGAAAGGGCAACCCTGTCCTGTCGGGCCAGCCAGTCC |
| | | ATTGGATCATCCTCCCTCGCCTGGTATCAGCAGAAACCGGGACAGGCT |
| | | CCGCGGCTGCTTATGTATGGGGCCAGCTCAAGAGCCTCCGGCATTCCC |
| | | GACCGGTTCTCCGGGTCCGGTTCCGGCACCGATTTCACCCTGACTATC |
| | | TCGAGGCTGGAGCCAGAGGACTTCGCCGTGTACTACTGCCAGCAGTAC |
| | | GCGGGGTCCCCGCCGTTCACGTTCGGACAGGGAACCAAGGTCGAGATC |
| | | AAG |
| 139114-aa | 1053 | EVQLVESGGGLVQPGGSLRLSCAVSGFALSNHGMSWVRRAPGKGLEWV |
| VH | | SGIVYSGSTYYAASVKGRFTISRDNSRNTLYLQMNSLRPEDTAIYYCS |
| | | AHGGESDVWGQGTTVTVSS |
| 139114-aa | 1054 | EIVLTQSPGTLSLSPGERATLSCRASQSIGSSSLAWYQQKPGQAPRLL |
| VL | | MYGASSRASGIPDRFSGSGSGTDFTLTISRLEPEDFAVYYCQQYAGSP |
| | | PFTFGQGTKVEIK |
| 139114-aa | 1055 | MALPVTALLLPLALLLHAARPEVQLVESGGGLVQPGGSLRLSCAVSGF |
| Full CAR | | ALSNHGMSWVRRAPGKGLEWVSGIVYSGSTYYAASVKGRFTISRDNSR |
| | | NTLYLQMNSLRPEDTAIYYCSAHGGESDVWGQGTTVTVSSASGGGGSG |
| | | GRASGGGGSEIVLTQSPGTLSLSPGERATLSCRASQSIGSSSLAWYQQ |
| | | KPGQAPRLLMYGASSRASGIPDRFSGSGSGTDFTLTISRLEPEDFAVY |
| | | YCQQYAGSPPFTFGQGTKVEIKTTTPAPRPPTPAPTIASQPLSLRPEA |
| | | CRPAAGGAVHTRGLDFACDIYIWAPLAGTCGVLLLSLVITLYCKRGRK |
| | | KLLYIFKQPFMRPVQTTQEEDGCSCRFPEEEEGGCELRVKFSRSADAP |
| | | AYKQGQNQLYNELNLGRREEYDVLDKRRGRDPEMGGKPRRKNPQEGLY |
| | | NELQKDKMAEAYSEIGMKGERRRGKGHDGLYQGLSTATKDTYDALHMQ |
| | | ALPPR |
| 139114-nt | 1056 | ATGGCCCTCCCTGTCACCGCCCTGCTGCTTCCGCTGGCTCTTCTGCTC |
| Full CAR | | CACGCCGCTCGGCCCGAAGTGCAATTGGTGGAATCTGGTGGAGGACTT |
| | | GTGCAACCTGGAGGATCACTGAGACTGTCATGCGCGGTGTCCGGTTTT |
| | | GCCCTGAGCAATCATGGGATGTCGTGGGTCCGGCGCGCCCCCGGAAAG |
| | | GGTCTGGAATGGGTGTCGGGTATCGTCTACTCCGGGAGCACTTACTAC |
| | | GCCGCGAGCGTGAAGGGCCGCTTCACCATTTCCCGCGATAACTCCCGC |
| | | AACACCCTGTACTTGCAAATGAACTCGCTCCGGCCTGAGGACACTGCC |
| | | ATCTACTACTGCTCCGCACACGGAGGAGAATCCGACGTGTGGGGCCAG |
| | | GGAACTACCGTGACCGTCAGCAGCGCCTCCGGCGGCGGGGGCTCAGGC |
| | | GGACGGGCTAGCGGCGGCGGTGGCTCCGAGATCGTGCTGACCCAGTCG |
| | | CCTGGCACTCTCTCGCTGAGCCCCGGGGAAAGGGCAACCCTGTCCTGT |
| | | CGGGCCAGCCAGTCCATTGGATCATCCTCCCTCGCCTGGTATCAGCAG |
| | | AAACCGGGACAGGCTCCGCGGCTGCTTATGTATGGGGCCAGCTCAAGA |
| | | GCCTCCGGCATTCCCGACCGGTTCTCCGGGTCCGGTTCCGGCACCGAT |
| | | TTCACCCTGACTATCTCGAGGCTGGAGCCAGAGGACTTCGCCGTGTAC |
| | | TACTGCCAGCAGTACGCGGGGTCCCCGCCGTTCACGTTCGGACAGGGA |
| | | ACCAAGGTCGAGATCAAGACCACTACCCCAGCACCGAGGCCACCCACC |
| | | CCGGCTCCTACCATCGCCTCCCAGCCTCTGTCCCTGCGTCCGGAGGCA |
| | | TGTAGACCCGCAGCTGGTGGGGCCGTGCATACCCGGGGTCTTGACTTC |
| | | GCCTGCGATATCTACATTTGGGCCCCTCTGGCTGGTACTTGCGGGGTC |
| | | CTGCTGCTTTCACTCGTGATCACTCTTTACTGTAAGCGCGGTCGGAAG |
| | | AAGCTGCTGTACATCTTTAAGCAACCCTTCATGAGGCCTGTGCAGACT |
| | | ACTCAAGAGGAGGACGGCTGTTCATGCCGGTTCCCAGAGGAGGAGGAA |
| | | GGCGGCTGCGAACTGCGCGTGAAATTCAGCCGCAGCGCAGATGCTCCA |
| | | GCCTACAAGCAGGGGCAGAACCAGCTCTACAACGAACTCAATCTTGGT |
| | | CGGAGAGAGGAGTACGACGTGCTGGACAAGCGGAGAGGACGGGACCCA |
| | | GAAATGGGCGGGAAGCCGCGCAGAAAGAATCCCCAAGAGGGCCTGTAC |
| | | AACGAGCTCCAAAAGGATAAGATGGCAGAAGCCTATAGCGAGATTGGT |
| | | ATGAAAGGGGAACGCAGAAGAGGCAAAGGCCACGACGGACTGTACCAG |
| | | GGACTCAGCACCGCCACCAAGGACACCTATGACGCTCTTCACATGCAG |
| | | GCCCTGCCGCCTCGG |

149362

| | | |
|---|---|---|
| 149362-aa | 1057 | QVQLQESGPGLVKPSETLSLTCTVSGGSISSSYYYWGWIRQPPGKGLE |
| ScFv | | WIGSIYYSGSAYYNPSLKSRVTISVDTSKNQFSLRLSSVTAADTAVYY |
| domain | | CARHWQEWPDAFDIWGQGTMVTVSSGGGGSGGGGSGGGGSETTLTQSP |
| | | AFMSATPGDKVIISCKASQDIDDAMNWYQQKPGEAPLFIIQSATSPVP |
| | | GIPPRFSGSGFGTDFSLTINNIESEDAAYYFCLQHDNFPLTFGQGTKL |
| | | EIK |
| 149362-nt | 1058 | CAAGTGCAGCTTCAGGAAAGCGGACCGGGCCTGGTCAAGCCATCCGAA |
| ScFv | | ACTCTCTCCCTGACTTGCACTGTGTCTGGCGGTTCCATCTCATCGTCG |
| domain | | TACTACTACTGGGGCTGGATTAGGCAGCCGCCCGGAAAGGGACTGGAG |
| | | TGGATCGGAAGCATCTACTATTCCGGCTCGGCGTACTACAACCCTAGC |
| | | CTCAAGTCGAGAGTGACCATCTCCGTGGATACCTCCAAGAACCAGTTT |
| | | TCCCTGCGCCTGAGCTCCGTGACCGCCGCTGACACCGCCGTGTACTAC |
| | | TGTGCTCGGCATTGGCAGGAATGGCCCGATGCCTTCGACATTTGGGGC |
| | | CAGGGCACTATGGTCACTGTGTCATCCGGGGGTGGAGGCAGCGGGGGA |
| | | GGAGGGTCCGGGGGGGGAGGTTCAGAGACAACCTTGACCCAGTCACCC |
| | | GCATTCATGTCCGCCACTCCGGGAGACAAGGTCATCATCTCGTGCAAA |
| | | GCGTCCCAGGATATCGACGATGCCATGAATTGGTACCAGCAGAAGCCT |
| | | GGCGAAGCGCCGCTGTTCATTATCCAATCCGCAACCTCGCCCGTGCCT |
| | | GGAATCCCACCGCGGTTCAGCGGCAGCGGTTTCGGAACCGACTTTTCC |
| | | CTGACCATTAACAACATTGAGTCCGAGGACGCCGCCTACTACTTCTGC |
| | | CTGCAACACGACAACTTCCCTCTCACGTTCGGCCAGGGAACCAAGCTG |
| | | GAAATCAAG |
| 149362-aa | 1059 | QVQLQESGPGLVKPSETLSLTCTVSGGSISSSYYYWGWIRQPPGKGLE |
| VH | | WIGSIYYSGSAYYNPSLKSRVTISVDTSKNQFSLRLSSVTAADTAVYY |
| | | CARHWQEWPDAFDIWGQGTMVTVSS |
| 149362-aa | 1060 | ETTLTQSPAFMSATPGDKVIISCKASQDIDDAMNWYQQKPGEAPLFII |
| VL | | QSATSPVPGIPPRFSGSGFGTDFSLTINNIESEDAAYYFCLQHDNFPL |
| | | TFGQGTKLEIK |
| 149362-aa | 1061 | MALPVTALLLPLALLLHAARPQVQLQESGPGLVKPSETLSLTCTVSGG |
| Full CAR | | SISSSYYYWGWIRQPPGKGLEWIGSIYYSGSAYYNPSLKSRVTISVDT |
| | | SKNQFSLRLSSVTAADTAVYYCARHWQEWPDAFDIWGQGTMVTVSSGG |
| | | GGSGGGGSGGGGSETTLTQSPAFMSATPGDKVIISCKASQDIDDAMNW |
| | | YQQKPGEAPLFIIQSATSPVPGIPPRFSGSGFGTDFSLTINNIESEDA |
| | | AYYFCLQHDNFPLTFGQGTKLEIKTTTPAPRPPTPAPTIASQPLSLRP |
| | | EACRPAAGGAVHTRGLDFACDIYIWAPLAGTCGVLLLSLVITLYCKRG |
| | | RKKLLYIFKQPFMRPVQTTQEEDGCSCRFPEEEEGGCELRVKFSRSAD |
| | | APAYKQGQNQLYNELNLGRREEYDVLDKRRGRDPEMGGKPRRKNPQEG |
| | | LYNELQKDKMAEAYSEIGMKGERRRGKGHDGLYQGLSTATKDTYDALH |
| | | MQALPPR |
| 149362-nt | 1062 | ATGGCCCTCCCTGTCACCGCCCTGCTGCTTCCGCTGGCTCTTCTGCTC |
| Full CAR | | CACGCCGCTCGGCCCCAAGTGCAGCTTCAGGAAAGCGGACCGGGCCTG |
| | | GTCAAGCCATCCGAAACTCTCTCCCTGACTTGCACTGTGTCTGGCGGT |
| | | TCCATCTCATCGTCGTACTACTACTGGGGCTGGATTAGGCAGCCGCCC |
| | | GGAAAGGGACTGGAGTGGATCGGAAGCATCTACTATTCCGGCTCGGCG |
| | | TACTACAACCCTAGCCTCAAGTCGAGAGTGACCATCTCCGTGGATACC |
| | | TCCAAGAACCAGTTTTCCCTGCGCCTGAGCTCCGTGACCGCCGCTGAC |
| | | ACCGCCGTGTACTACTGTGCTCGGCATTGGCAGGAATGGCCCGATGCC |
| | | TTCGACATTTGGGGCCAGGGCACTATGGTCACTGTGTCATCCGGGGGT |
| | | GGAGGCAGCGGGGGAGGAGGGTCCGGGGGGGGAGGTTCAGAGACAACC |
| | | TTGACCCAGTCACCCGCATTCATGTCCGCCACTCCGGGAGACAAGGTC |
| | | ATCATCTCGTGCAAAGCGTCCCAGGATATCGACGATGCCATGAATTGG |
| | | TACCAGCAGAAGCCTGGCGAAGCGCCGCTGTTCATTATCCAATCCGCA |
| | | ACCTCGCCCGTGCCTGGAATCCCACCGCGGTTCAGCGGCAGCGGTTTC |
| | | GGAACCGACTTTTCCCTGACCATTAACAACATTGAGTCCGAGGACGCC |
| | | GCCTACTACTTCTGCCTGCAACACGACAACTTCCCTCTCACGTTCGGC |
| | | CAGGGAACCAAGCTGGAAATCAAGACCACTACCCCAGCACCGAGGCCA |
| | | CCCACCCCGGCTCCTACCATCGCCTCCCAGCCTCTGTCCCTGCGTCCG |
| | | GAGGCATGTAGACCCGCAGCTGGTGGGGCCGTGCATACCCGGGGTCTT |
| | | GACTTCGCCTGCGATATCTACATTTGGGCCCCTCTGGCTGGTACTTGC |
| | | GGGGTCCTGCTGCTTTCACTCGTGATCACTCTTTACTGTAAGCGCGGT |
| | | CGGAAGAAGCTGCTGTACATCTTTAAGCAACCCTTCATGAGGCCTGTG |
| | | CAGACTACTCAAGAGGAGGACGGCTGTTCATGCCGGTTCCCAGAGGAG |
| | | GAGGAAGGCGGCTGCGAACTGCGCGTGAAATTCAGCCGCAGCGCAGAT |
| | | GCTCCAGCCTACAAGCAGGGGCAGAACCAGCTCTACAACGAACTCAAT |
| | | CTTGGTCGGAGAGAGGAGTACGACGTGCTGGACAAGCGGAGAGGACGG |
| | | GACCCAGAAATGGGCGGGAAGCCGCGCAGAAAGAATCCCCAAGAGGGC |
| | | CTGTACAACGAGCTCCAAAAGGATAAGATGGCAGAAGCCTATAGCGAG |
| | | ATTGGTATGAAAGGGGAACGCAGAAGAGGCAAAGGCCACGACGGACTG |
| | | TACCAGGGACTCAGCACCGCCACCAAGGACACCTATGACGCTCTTCAC |
| | | ATGCAGGCCCTGCCGCCTCGG |

149363

| | | |
|---|---|---|
| 149363-aa | 1063 | VNLRESGPALVKPTQTLTLTCTFSGFSLRTSGMCVSWIRQPPGKALEW |
| ScFv | | LARIDWDEDKFYSTSLKTRLTISKDTSDNQVVLRMTNMDPADTATYYC |
| domain | | ARSGAGGTSATAFDIWGPGTMVTVSSGGGGSGGGGSGGGGSDIQMTQS |
| | | PSSLSASVGDRVTITCRASQDIYNNLAWFQLKPGSAPRSLMYAANKSQ |
| | | SGVPSRFSGSASGTDFTLTISSLQPEDFATYYCQHYYRFPYSFGQGTK |
| | | LEIK |
| 149363-nt | 1064 | CAAGTCAATCTGCGCGAATCCGGCCCCGCCTTGGTCAAGCCTACCCAG |
| ScFv | | ACCCTCACTCTGACCTGTACTTTCTCCGGCTTCTCCCTGCGGACTTCC |
| domain | | GGGATGTGCGTGTCCTGGATCAGACAGCCTCCGGGAAAGGCCCTGGAG |
| | | TGGCTCGCTCGCATTGACTGGGATGAGGACAAGTTCTACTCCACCTCA |
| | | CTCAAGACCAGGCTGACCATCAGCAAAGATACCTCTGACAACCAAGTG |
| | | GTGCTCCGCATGACCAACATGGACCCAGCCGACACTGCCACTTACTAC |
| | | TGCGCGAGGAGCGGAGCGGGCGGAACCTCCGCCACCGCCTTCGATATT |
| | | TGGGGCCCGGGTACCATGGTCACCGTGTCAAGCGGAGGAGGGGGGTCC |
| | | GGGGGCGGCGGTTCCGGGGGAGGCGGATCGGACATTCAGATGACTCAG |
| | | TCACCATCGTCCCTGAGCGCTAGCGTGGGCGACAGAGTGACAATCACT |
| | | TGCCGGGCATCCCAGGACATCTATAACAACCTTGCGTGGTTCCAGCTG |
| | | AAGCCTGGTTCCGCACCGCGGTCACTTATGTACGCCGCCAACAAGAGC |
| | | CAGTCGGGAGTGCCGTCCCGGTTTTCCGGTTCGGCCTCGGGAACTGAC |
| | | TTCACCCTGACGATCTCCAGCCTGCAACCCGAGGATTTCGCCACCTAC |
| | | TACTGCCAGCACTACTACCGCTTTCCCTACTCGTTCGGACAGGGAACC |
| | | AAGCTGGAAATCAAG |
| 149363-aa | 1065 | QVNLRESGPALVKPTQTLTLTCTFSGFSLRTSGMCVSWIRQPPGKALE |
| VH | | WLARIDWDEDKFYSTSLKTRLTISKDTSDNQVVLRMTNMDPADTATYY |
| | | CARSGAGGTSATAFDIWGPGTMVTVSS |
| 149363-aa | 1066 | DIQMTQSPSSLSASVGDRVTITCRASQDIYNNLAWFQLKPGSAPRSLM |
| VL | | YAANKSQSGVPSRFSGSASGTDFTLTISSLQPEDFATYYCQHYYRFPY |
| | | SFGQGTKLEIK |
| 149363-aa | 1067 | MALPVTALLLPLALLLHAARPQVNLRESGPALVKPTQTLTLTCTFSGF |
| Full CAR | | SLRTSGMCVSWIRQPPGKALEWLARIDWDEDKFYSTSLKTRLTISKDT |
| | | SDNQVVLRMTNMDPADTATYYCARSGAGGTSATAFDIWGPGTMVTVSS |
| | | GGGGSGGGGSGGGGSDIQMTQSPSSLSASVGDRVTITCRASQDIYNNL |
| | | AWFQLKPGSAPRSLMYAANKSQSGVPSRFSGSASGTDFTLTISSLQPE |
| | | DFATYYCQHYYRFPYSFGQGTKLEIKTTTPAPRPPTPAPTIASQPLSL |
| | | RPEACRPAAGGAVHTRGLDFACDIYIWAPLAGTCGVLLLSLVITLYCK |
| | | RGRKKLLYIFKQPFMRPVQTTQEEDGCSCRFPEEEEGGCELRVKFSRS |
| | | ADAPAYKQGQNQLYNELNLGRREEYDVLDKRRGRDPEMGGKPRRKNPQ |
| | | EGLYNELQKDKMAEAYSEIGMKGERRRGKGHDGLYQGLSTATKDTYDA |
| | | LHMQALPPR |
| 149363-nt | 1068 | ATGGCCCTCCCTGTCACCGCCCTGCTGCTTCCGCTGGCTCTTCTGCTC |
| Full CAR | | CACGCCGCTCGGCCCCAAGTCAATCTGCGCGAATCCGGCCCCGCCTTG |
| | | GTCAAGCCTACCCAGACCCTCACTCTGACCTGTACTTTCTCCGGCTTC |
| | | TCCCTGCGGACTTCCGGGATGTGCGTGTCCTGGATCAGACAGCCTCCG |
| | | GGAAAGGCCCTGGAGTGGCTCGCTCGCATTGACTGGGATGAGGACAAG |
| | | TTCTACTCCACCTCACTCAAGACCAGGCTGACCATCAGCAAAGATACC |
| | | TCTGACAACCAAGTGGTGCTCCGCATGACCAACATGGACCCAGCCGAC |
| | | ACTGCCACTTACTACTGCGCGAGGAGCGGAGCGGGCGGAACCTCCGCC |
| | | ACCGCCTTCGATATTTGGGGCCCGGGTACCATGGTCACCGTGTCAAGC |
| | | GGAGGAGGGGGGTCCGGGGGCGGCGGTTCCGGGGGAGGCGGATCGGAC |
| | | ATTCAGATGACTCAGTCACCATCGTCCCTGAGCGCTAGCGTGGGCGAC |
| | | AGAGTGACAATCACTTGCCGGGCATCCCAGGACATCTATAACAACCTT |
| | | GCGTGGTTCCAGCTGAAGCCTGGTTCCGCACCGCGGTCACTTATGTAC |
| | | GCCGCCAACAAGAGCCAGTCGGGAGTGCCGTCCCGGTTTTCCGGTTCG |
| | | GCCTCGGGAACTGACTTCACCCTGACGATCTCCAGCCTGCAACCCGAG |
| | | GATTTCGCCACCTACTACTGCCAGCACTACTACCGCTTTCCCTACTCG |
| | | TTCGGACAGGGAACCAAGCTGGAAATCAAGACCACTACCCCAGCACCG |
| | | AGGCCACCCACCCCGGCTCCTACCATCGCCTCCCAGCCTCTGTCCCTG |
| | | CGTCCGGAGGCATGTAGACCCGCAGCTGGTGGGGCCGTGCATACCCGG |
| | | GGTCTTGACTTCGCCTGCGATATCTACATTTGGGCCCCTCTGGCTGGT |
| | | ACTTGCGGGGTCCTGCTGCTTTCACTCGTGATCACTCTTTACTGTAAG |
| | | CGCGGTCGGAAGAAGCTGCTGTACATCTTTAAGCAACCCTTCATGAGG |
| | | CCTGTGCAGACTACTCAAGAGGAGGACGGCTGTTCATGCCGGTTCCCA |
| | | GAGGAGGAGGAAGGCGGCTGCGAACTGCGCGTGAAATTCAGCCGCAGC |
| | | GCAGATGCTCCAGCCTACAAGCAGGGGCAGAACCAGCTCTACAACGAA |
| | | CTCAATCTTGGTCGGAGAGAGGAGTACGACGTGCTGGACAAGCGGAGA |
| | | GGACGGGACCCAGAAATGGGCGGGAAGCCGCGCAGAAAGAATCCCCAA |
| | | GAGGGCCTGTACAACGAGCTCCAAAAGGATAAGATGGCAGAAGCCTAT |
| | | AGCGAGATTGGTATGAAAGGGGAACGCAGAAGAGGCAAAGGCCACGAC |
| | | GGACTGTACCAGGGACTCAGCACCGCCACCAAGGACACCTATGACGCT |
| | | CTTCACATGCAGGCCCTGCCGCCTCGG |

149364

| | | |
|---|---|---|
| 149364-aa | 1069 | EVQLVESGGGLVKPGGSLRLSCAASGFTFSSYSMNWVRQAPGKGLEWV |
| ScFv | | SSISSSSSYIYYADSVKGRFTISRDNAKNSLYLQMNSLRAEDTAVYYC |
| domain | | AKTIAAVYAFDIWGQGTTVTVSSGGGGSGGGGSGGGGSEIVLTQSPLS |
| | | LPVTPEEPASISCRSSQSLLHSNGYNYLDWYLQKPGQSPQLLIYLGSN |
| | | RASGVPDRFSGSGSGTDFTLKISRVEAEDVGVYYCMQALQTPYTFGQG |
| | | TKLEIK |
| 149364-nt | 1070 | GAAGTGCAGCTTGTCGAATCCGGGGGGGGACTGGTCAAGCCGGGCGGA |
| ScFv | | TCACTGAGACTGTCCTGCGCCGCGAGCGGCTTCACGTTCTCCTCCTAC |
| domain | | TCCATGAACTGGGTCCGCCAAGCCCCCGGGAAGGGACTGGAATGGGTG |
| | | TCCTCTATCTCCTCGTCGTCGTCCTACATCTACTACGCCGACTCCGTG |
| | | AAGGGAAGATTCACCATTTCCCGCGACAACGCAAAGAACTCACTGTAC |
| | | TTGCAAATGAACTCACTCCGGGCCGAAGATACTGCTGTGTACTATTGC |
| | | GCCAAGACTATTGCCGCCGTCTACGCTTTCGACATCTGGGGCCAGGGA |
| | | ACCACCGTGACTGTGTCGTCCGGTGGTGGTGGCTCGGGCGGAGGAGGA |
| | | AGCGGCGGCGGGGGGTCCGAGATTGTGCTGACCCAGTCGCCACTGAGC |
| | | CTCCCTGTGACCCCCGAGGAACCCGCCAGCATCAGCTGCCGGTCCAGC |
| | | CAGTCCCTGCTCCACTCCAACGGATACAATTACCTCGATTGGTACCTT |
| | | CAGAAGCCTGGACAAAGCCCGCAGCTGCTCATCTACTTGGGATCAAAC |
| | | CGCGCGTCAGGAGTGCCTGACCGGTTCTCCGGCTCGGGCAGCGGTACC |
| | | GATTTCACCCTGAAAATCTCCAGGGTGGAGGCAGAGGACGTGGGAGTG |
| | | TATTACTGTATGCAGGCGCTGCAGACTCCGTACACATTTGGGCAGGGC |
| | | ACCAAGCTGGAGATCAAG |
| 149364-aa | 1071 | EVQLVESGGGLVKPGGSLRLSCAASGFTFSSYSMNWVRQAPGKGLEWV |
| VH | | SSISSSSSYIYYADSVKGRFTISRDNAKNSLYLQMNSLRAEDTAVYYC |
| | | AKTIAAVYAFDIWGQGTTVTVSS |
| 149364-aa | 1072 | EIVLTQSPLSLPVTPEEPASISCRSSQSLLHSNGYNYLDWYLQKPGQS |
| VL | | PQLLIYLGSNRASGVPDRFSGSGSGTDFTLKISRVEAEDVGVYYCMQA |
| | | LQTPYTFGQGTKLEIK |
| 149364-aa | 1073 | MALPVTALLLPLALLLHAARPEVQLVESGGGLVKPGGSLRLSCAASGF |
| Full CAR | | TFSSYSMNWVRQAPGKGLEWVSSISSSSSYIYYADSVKGRFTISRDNA |
| | | KNSLYLQMNSLRAEDTAVYYCAKTIAAVYAFDIWGQGTTVTVSSGGGG |
| | | SGGGGSGGGGSEIVLTQSPLSLPVTPEEPASISCRSSQSLLHSNGYNY |
| | | LDWYLQKPGQSPQLLIYLGSNRASGVPDRFSGSGSGTDFTLKISRVEA |
| | | EDVGVYYCMQALQTPYTFGQGTKLEIKTTTPAPRPPTPAPTIASQPLS |
| | | LRPEACRPAAGGAVHTRGLDFACDIYIWAPLAGTCGVLLLSLVITLYC |
| | | KRGRKKLLYIFKQPFMRPVQTTQEEDGCSCRFPEEEEGGCELRVKFSR |
| | | SADAPAYKQGQNQLYNELNLGRREEYDVLDKRRGRDPEMGGKPRRKNP |
| | | QEGLYNELQKDKMAEAYSEIGMKGERRRGKGHDGLYQGLSTATKDTYD |
| | | ALHMQALPPR |
| 149364-nt | 1074 | ATGGCCCTCCCTGTCACCGCCCTGCTGCTTCCGCTGGCTCTTCTGCTC |
| Full CAR | | CACGCCGCTCGGCCCGAAGTGCAGCTTGTCGAATCCGGGGGGGGACTG |
| | | GTCAAGCCGGGCGGATCACTGAGACTGTCCTGCGCCGCGAGCGGCTTC |
| | | ACGTTCTCCTCCTACTCCATGAACTGGGTCCGCCAAGCCCCCGGGAAG |
| | | GGACTGGAATGGGTGTCCTCTATCTCCTCGTCGTCGTCCTACATCTAC |
| | | TACGCCGACTCCGTGAAGGGAAGATTCACCATTTCCCGCGACAACGCA |
| | | AAGAACTCACTGTACTTGCAAATGAACTCACTCCGGGCCGAAGATACT |
| | | GCTGTGTACTATTGCGCCAAGACTATTGCCGCCGTCTACGCTTTCGAC |
| | | ATCTGGGGCCAGGGAACCACCGTGACTGTGTCGTCCGGTGGTGGTGGC |
| | | TCGGGCGGAGGAGGAAGCGGCGGCGGGGGGTCCGAGATTGTGCTGACC |
| | | CAGTCGCCACTGAGCCTCCCTGTGACCCCCGAGGAACCCGCCAGCATC |
| | | AGCTGCCGGTCCAGCCAGTCCCTGCTCCACTCCAACGGATACAATTAC |
| | | CTCGATTGGTACCTTCAGAAGCCTGGACAAAGCCCGCAGCTGCTCATC |
| | | TACTTGGGATCAAACCGCGCGTCAGGAGTGCCTGACCGGTTCTCCGGC |
| | | TCGGGCAGCGGTACCGATTTCACCCTGAAAATCTCCAGGGTGGAGGCA |
| | | GAGGACGTGGGAGTGTATTACTGTATGCAGGCGCTGCAGACTCCGTAC |
| | | ACATTTGGGCAGGGCACCAAGCTGGAGATCAAGACCACTACCCCAGCA |
| | | CCGAGGCCACCCACCCCGGCTCCTACCATCGCCTCCCAGCCTCTGTCC |
| | | CTGCGTCCGGAGGCATGTAGACCCGCAGCTGGTGGGGCCGTGCATACC |
| | | CGGGGTCTTGACTTCGCCTGCGATATCTACATTTGGGCCCCTCTGGCT |
| | | GGTACTTGCGGGGTCCTGCTGCTTTCACTCGTGATCACTCTTTACTGT |
| | | AAGCGCGGTCGGAAGAAGCTGCTGTACATCTTTAAGCAACCCTTCATG |
| | | AGGCCTGTGCAGACTACTCAAGAGGAGGACGGCTGTTCATGCCGGTTC |
| | | CCAGAGGAGGAGGAAGGCGGCTGCGAACTGCGCGTGAAATTCAGCCGC |
| | | AGCGCAGATGCTCCAGCCTACAAGCAGGGGCAGAACCAGCTCTACAAC |
| | | GAACTCAATCTTGGTCGGAGAGAGGAGTACGACGTGCTGGACAAGCGG |
| | | AGAGGACGGGACCCAGAAATGGGCGGGAAGCCGCGCAGAAAGAATCCC |
| | | CAAGAGGGCCTGTACAACGAGCTCCAAAAGGATAAGATGGCAGAAGCC |
| | | TATAGCGAGATTGGTATGAAAGGGGAACGCAGAAGAGGCAAAGGCCAC |
| | | GACGGACTGTACCAGGGACTCAGCACCGCCACCAAGGACACCTATGAC |
| | | GCTCTTCACATGCAGGCCCTGCCGCCTCGG |

149365

| | | |
|---|---|---|
| 149365-aa | 1075 | EVQLVESGGGLVKPGGSLRLSCAASGFTFSDYYMSWIRQAPGKGLEWV |
| ScFv | | SYISSSGSTIYYADSVKGRFTISRDNAKNSLYLQMNSLRAEDTAVYYC |
| domain | | ARDLRGAFDIWGQGTMVTVSSGGGGSGGGGSGGGGSSYVLTQSPSVSA |
| | | APGYTATISCGGNNIGTKSVHWYQQKPGQAPLLVIRDDSVRPSKIPGR |
| | | FSGSNSGNMATLTISGVQAGDEADFYCQVWDSDSEHVVFGGGTKLTVL |
| 149365-nt | 1076 | GAAGTCCAGCTCGTGGAGTCCGGCGGAGGCCTTGTGAAGCCTGGAGGT |
| ScFv | | TCGCTGAGACTGTCCTGCGCCGCCTCCGGCTTCACCTTCTCCGACTAC |
| domain | | TACATGTCCTGGATCAGACAGGCCCCGGGAAAGGGCCTGGAATGGGTG |
| | | TCCTACATCTCGTCATCGGGCAGCACTATCTACTACGCGGACTCAGTG |
| | | AAGGGGCGGTTCACCATTTCCCGGGATAACGCGAAGAACTCGCTGTAT |
| | | CTGCAAATGAACTCACTGAGGGCCGAGGACACCGCCGTGTACTACTGC |
| | | GCCCGCGATCTCCGCGGGGCATTTGACATCTGGGGACAGGGAACCATG |
| | | GTCACAGTGTCCAGCGGAGGGGGAGGATCGGGTGGCGGAGGTTCCGGG |
| | | GGTGGAGGCTCCTCCTACGTGCTGACTCAGAGCCCAAGCGTCAGCGCT |
| | | GCGCCCGGTTACACGGCAACCATCTCCTGTGGCGGAAACAACATTGGG |
| | | ACCAAGTCTGTGCACTGGTATCAGCAGAAGCCGGGCCAAGCTCCCCTG |
| | | TTGGTGATCCGCGATGACTCCGTGCGGCCTAGCAAAATTCCGGGACGG |
| | | TTCTCCGGCTCCAACAGCGGCAATATGGCCACTCTCACCATCTCGGGA |
| | | GTGCAGGCCGGAGATGAAGCCGACTTCTACTGCCAAGTCTGGGACTCA |
| | | GACTCCGAGCATGTGGTGTTCGGGGGCGGAACCAAGCTGACTGTGCTC |
| 149365-aa | 1077 | EVQLVESGGGLVKPGGSLRLSCAASGFTFSDYYMSWIRQAPGKGLEWV |
| VH | | SYISSSGSTIYYADSVKGRFTISRDNAKNSLYLQMNSLRAEDTAVYYC |
| | | ARDLRGAFDIWGQGTMVTVSS |
| 149365-aa | 1078 | SYVLTQSPSVSAAPGYTATISCGGNNIGTKSVHWYQQKPGQAPLLVIR |
| VL | | DDSVRPSKIPGRFSGSNSGNMATLTISGVQAGDEADFYCQVWDSDSEH |
| | | VVFGGGTKLTVL |
| 149365-aa | 1079 | MALPVTALLLPLALLLHAARPEVQLVESGGGLVKPGGSLRLSCAASGF |
| Full CAR | | TFSDYYMSWIRQAPGKGLEWVSYISSSGSTIYYADSVKGRFTISRDNA |
| | | KNSLYLQMNSLRAEDTAVYYCARDLRGAFDIWGQGTMVTVSSGGGGSG |
| | | GGGSGGGGSSYVLTQSPSVSAAPGYTATISCGGNNIGTKSVHWYQQKP |
| | | GQAPLLVIRDDSVRPSKIPGRFSGSNSGNMATLTISGVQAGDEADFYC |
| | | QVWDSDSEHVVFGGGTKLTVLTTTPAPRPPTPAPTIASQPLSLRPEAC |
| | | RPAAGGAVHTRGLDFACDIYIWAPLAGTCGVLLLSLVITLYCKRGRKK |
| | | LLYIFKQPFMRPVQTTQEEDGCSCRFPEEEEGGCELRVKFSRSADAPA |
| | | YKQGQNQLYNELNLGRREEYDVLDKRRGRDPEMGGKPRRKNPQEGLYN |
| | | ELQKDKMAEAYSEIGMKGERRRGKGHDGLYQGLSTATKDTYDALHMQA |
| | | LPPR |
| 149365-nt | 1080 | ATGGCCCTCCCTGTCACCGCCCTGCTGCTTCCGCTGGCTCTTCTGCTC |
| Full CAR | | CACGCCGCTCGGCCCGAAGTCCAGCTCGTGGAGTCCGGCGGAGGCCTT |
| | | GTGAAGCCTGGAGGTTCGCTGAGACTGTCCTGCGCCGCCTCCGGCTTC |
| | | ACCTTCTCCGACTACTACATGTCCTGGATCAGACAGGCCCCGGGAAAG |
| | | GGCCTGGAATGGGTGTCCTACATCTCGTCATCGGGCAGCACTATCTAC |
| | | TACGCGGACTCAGTGAAGGGGCGGTTCACCATTTCCCGGGATAACGCG |
| | | AAGAACTCGCTGTATCTGCAAATGAACTCACTGAGGGCCGAGGACACC |
| | | GCCGTGTACTACTGCGCCCGCGATCTCCGCGGGGCATTTGACATCTGG |
| | | GGACAGGGAACCATGGTCACAGTGTCCAGCGGAGGGGGAGGATCGGGT |
| | | GGCGGAGGTTCCGGGGGTGGAGGCTCCTCCTACGTGCTGACTCAGAGC |
| | | CCAAGCGTCAGCGCTGCGCCCGGTTACACGGCAACCATCTCCTGTGGC |
| | | GGAAACAACATTGGGACCAAGTCTGTGCACTGGTATCAGCAGAAGCCG |
| | | GGCCAAGCTCCCCTGTTGGTGATCCGCGATGACTCCGTGCGGCCTAGC |
| | | AAAATTCCGGGACGGTTCTCCGGCTCCAACAGCGGCAATATGGCCACT |
| | | CTCACCATCTCGGGAGTGCAGGCCGGAGATGAAGCCGACTTCTACTGC |
| | | CAAGTCTGGGACTCAGACTCCGAGCATGTGGTGTTCGGGGGCGGAACC |
| | | AAGCTGACTGTGCTCACCACTACCCCAGCACCGAGGCCACCCACCCCG |
| | | GCTCCTACCATCGCCTCCCAGCCTCTGTCCCTGCGTCCGGAGGCATGT |
| | | AGACCCGCAGCTGGTGGGGCCGTGCATACCCGGGGTCTTGACTTCGCC |
| | | TGCGATATCTACATTTGGGCCCCTCTGGCTGGTACTTGCGGGGTCCTG |
| | | CTGCTTTCACTCGTGATCACTCTTTACTGTAAGCGCGGTCGGAAGAAG |
| | | CTGCTGTACATCTTTAAGCAACCCTTCATGAGGCCTGTGCAGACTACT |
| | | CAAGAGGAGGACGGCTGTTCATGCCGGTTCCCAGAGGAGGAGGAAGGC |
| | | GGCTGCGAACTGCGCGTGAAATTCAGCCGCAGCGCAGATGCTCCAGCC |
| | | TACAAGCAGGGGCAGAACCAGCTCTACAACGAACTCAATCTTGGTCGG |
| | | AGAGAGGAGTACGACGTGCTGGACAAGCGGAGAGGACGGGACCCAGAA |
| | | ATGGGCGGGAAGCCGCGCAGAAAGAATCCCCAAGAGGGCCTGTACAAC |
| | | GAGCTCCAAAAGGATAAGATGGCAGAAGCCTATAGCGAGATTGGTATG |
| | | AAAGGGGAACGCAGAAGAGGCAAAGGCCACGACGGACTGTACCAGGGA |
| | | CTCAGCACCGCCACCAAGGACACCTATGACGCTCTTCACATGCAGGCC |
| | | CTGCCGCCTCGG |

149366

| | | |
|---|---|---|
| 149366-aa | 1081 | QVQLVQSGAEVKKPGASVKVSCKPSGYTVTSHYIHWVRRAPGQGLEWM |
| ScFv | | GMINPSGGVTAYSQTLQGRVTMTSDTSSSTVYMELSSLRSEDTAMYYC |
| domain | | AREGSGSGWYFDFWGRGTLVTVSSGGGGSGGGGSGGGGSSYVLTQPPS |
| | | VSVSPGQTASITCSGDGLSKKYVSWYQQKAGQSPVVLISRDKERPSGI |
| | | PDRFSGSNSADTATLTISGTQAMDEADYYCQAWDDTTVVFGGGTKLTV |
| | | L |
| 149366-nt | 1082 | CAAGTGCAGCTGGTGCAGAGCGGGGCCGAAGTCAAGAAGCCGGGAGCC |
| ScFv | | TCCGTGAAAGTGTCCTGCAAGCCTTCGGGATACACCGTGACCTCCCAC |
| domain | | TACATTCATTGGGTCCGCCGCGCCCCCGGCCAAGGACTCGAGTGGATG |
| | | GGCATGATCAACCCTAGCGGCGGAGTGACCGCGTACAGCCAGACGCTG |
| | | CAGGGACGCGTGACTATGACCTCGGATACCTCCTCCTCCACCGTCTAT |
| | | ATGGAACTGTCCAGCCTGCGGTCCGAGGATACCGCCATGTACTACTGC |
| | | GCCCGGGAAGGATCAGGCTCCGGGTGGTATTTCGACTTCTGGGGAAGA |
| | | GGCACCCTCGTGACTGTGTCATCTGGGGGAGGGGGTTCCGGTGGTGGC |
| | | GGATCGGGAGGAGGCGGTTCATCCTACGTGCTGACCCAGCCACCCTCC |
| | | GTGTCCGTGAGCCCCGGCCAGACTGCATCGATTACATGTAGCGGCGAC |
| | | GGCCTCTCCAAGAAATACGTGTCGTGGTACCAGCAGAAGGCCGGACAG |
| | | AGCCCGGTGGTGCTGATCTCAAGAGATAAGGAGCGGCCTAGCGGAATC |
| | | CCGGACAGGTTCTCGGGTTCCAACTCCGCGGACACTGCTACTCTGACC |
| | | ATCTCGGGGACCCAGGCTATGGACGAAGCCGATTACTACTGCCAAGCC |
| | | TGGGACGACACTACTGTCGTGTTTGGAGGGGGCACCAAGTTGACCGTC |
| | | CTT |
| 149366-aa | 1083 | QVQLVQSGAEVKKPGASVKVSCKPSGYTVTSHYIHWVRRAPGQGLEWM |
| VH | | GMINPSGGVTAYSQTLQGRVTMTSDTSSSTVYMELSSLRSEDTAMYYC |
| | | AREGSGSGWYFDFWGRGTLVTVSS |
| 149366-aa | 1084 | SYVLTQPPSVSVSPGQTASITCSGDGLSKKYVSWYQQKAGQSPVVLIS |
| VL | | RDKERPSGIPDRFSGSNSADTATLTISGTQAMDEADYYCQAWDDTTVV |
| | | FGGGTKLTVL |
| 149366-aa | 1085 | MALPVTALLLPLALLLHAARPQVQLVQSGAEVKKPGASVKVSCKPSGY |
| Full CAR | | TVTSHYIHWVRRAPGQGLEWMGMINPSGGVTAYSQTLQGRVTMTSDTS |
| | | SSTVYMELSSLRSEDTAMYYCAREGSGSGWYFDFWGRGTLVTVSSGGG |
| | | GSGGGGSGGGGSSYVLTQPPSVSVSPGQTASITCSGDGLSKKYVSWYQ |
| | | QKAGQSPVVLISRDKERPSGIPDRFSGSNSADTATLTISGTQAMDEAD |
| | | YYCQAWDDTTVVFGGGTKLTVLTTTPAPRPPTPAPTIASQPLSLRPEA |
| | | CRPAAGGAVHTRGLDFACDIYIWAPLAGTCGVLLLSLVITLYCKRGRK |
| | | KLLYIFKQPFMRPVQTTQEEDGCSCRFPEEEEGGCELRVKFSRSADAP |
| | | AYKQGQNQLYNELNLGRREEYDVLDKRRGRDPEMGGKPRRKNPQEGLY |
| | | NELQKDKMAEAYSEIGMKGERRRGKGHDGLYQGLSTATKDTYDALHMQ |
| | | ALPPR |
| 149366-nt | 1086 | ATGGCCCTCCCTGTCACCGCCCTGCTGCTTCCGCTGGCTCTTCTGCTC |
| Full CAR | | CACGCCGCTCGGCCCCAAGTGCAGCTGGTGCAGAGCGGGGCCGAAGTC |
| | | AAGAAGCCGGGAGCCTCCGTGAAAGTGTCCTGCAAGCCTTCGGGATAC |
| | | ACCGTGACCTCCCACTACATTCATTGGGTCCGCCGCGCCCCCGGCCAA |
| | | GGACTCGAGTGGATGGGCATGATCAACCCTAGCGGCGGAGTGACCGCG |
| | | TACAGCCAGACGCTGCAGGGACGCGTGACTATGACCTCGGATACCTCC |
| | | TCCTCCACCGTCTATATGGAACTGTCCAGCCTGCGGTCCGAGGATACC |
| | | GCCATGTACTACTGCGCCCGGGAAGGATCAGGCTCCGGGTGGTATTTC |
| | | GACTTCTGGGGAAGAGGCACCCTCGTGACTGTGTCATCTGGGGGAGGG |
| | | GGTTCCGGTGGTGGCGGATCGGGAGGAGGCGGTTCATCCTACGTGCTG |
| | | ACCCAGCCACCCTCCGTGTCCGTGAGCCCCGGCCAGACTGCATCGATT |
| | | ACATGTAGCGGCGACGGCCTCTCCAAGAAATACGTGTCGTGGTACCAG |
| | | CAGAAGGCCGGACAGAGCCCGGTGGTGCTGATCTCAAGAGATAAGGAG |
| | | CGGCCTAGCGGAATCCCGGACAGGTTCTCGGGTTCCAACTCCGCGGAC |
| | | ACTGCTACTCTGACCATCTCGGGGACCCAGGCTATGGACGAAGCCGAT |
| | | TACTACTGCCAAGCCTGGGACGACACTACTGTCGTGTTTGGAGGGGGC |
| | | ACCAAGTTGACCGTCCTTACCACTACCCCAGCACCGAGGCCACCCACC |
| | | CCGGCTCCTACCATCGCCTCCCAGCCTCTGTCCCTGCGTCCGGAGGCA |
| | | TGTAGACCCGCAGCTGGTGGGGCCGTGCATACCCGGGGTCTTGACTTC |
| | | GCCTGCGATATCTACATTTGGGCCCCTCTGGCTGGTACTTGCGGGGTC |
| | | CTGCTGCTTTCACTCGTGATCACTCTTTACTGTAAGCGCGGTCGGAAG |
| | | AAGCTGCTGTACATCTTTAAGCAACCCTTCATGAGGCCTGTGCAGACT |
| | | ACTCAAGAGGAGGACGGCTGTTCATGCCGGTTCCCAGAGGAGGAGGAA |
| | | GGCGGCTGCGAACTGCGCGTGAAATTCAGCCGCAGCGCAGATGCTCCA |
| | | GCCTACAAGCAGGGGCAGAACCAGCTCTACAACGAACTCAATCTTGGT |
| | | CGGAGAGAGGAGTACGACGTGCTGGACAAGCGGAGAGGACGGGACCCA |
| | | GAAATGGGCGGGAAGCCGCGCAGAAAGAATCCCCAAGAGGGCCTGTAC |
| | | AACGAGCTCCAAAAGGATAAGATGGCAGAAGCCTATAGCGAGATTGGT |
| | | ATGAAAGGGGAACGCAGAAGAGGCAAAGGCCACGACGGACTGTACCAG |
| | | GGACTCAGCACCGCCACCAAGGACACCTATGACGCTCTTCACATGCAG |
| | | GCCCTGCCGCCTCGG |

149367

| | | |
|---|---|---|
| 149367-aa | 1087 | QVQLQESGPGLVKPSQTLSLTCTVSGGSISSGGYYWSWIRQHPGKGLE |
| ScFv | | WIGYIYYSGSTYYNPSLKSRVTISVDTSKNQFSLKLSSVTAADTAVYY |
| domain | | CARAGIAARLRGAFDIWGQGTMVTVSSGGGGSGGGGSGGGGSDIVMTQ |
| | | SPSSVSASVGDRVIITCRASQGIRNWLAWYQQKPGKAPNLLIYAASNL |
| | | QSGVPSRFSGSGSGADFTLTISSLQPEDVATYYCQKYNSAPFTFGPGT |
| | | KVDIK |
| 149367-nt | 1088 | CAAGTGCAGCTTCAGGAGAGCGGCCCGGGACTCGTGAAGCCGTCCCAG |
| ScFv | | ACCCTGTCCCTGACTTGCACCGTGTCGGGAGGAAGCATCTCGAGCGGA |
| domain | | GGCTACTATTGGTCGTGGATTCGGCAGCACCCTGGAAAGGGCCTGGAA |
| | | TGGATCGGCTACATCTACTACTCCGGCTCGACCTACTACAACCCATCG |
| | | CTGAAGTCCAGAGTGACAATCTCAGTGGACACGTCCAAGAATCAGTTC |
| | | AGCCTGAAGCTCTCTTCCGTGACTGCGGCCGACACCGCCGTGTACTAC |
| | | TGCGCACGCGCTGGAATTGCCGCCCGGCTGAGGGGTGCCTTCGACATT |
| | | TGGGGACAGGGCACCATGGTCACCGTGTCCTCCGGCGGCGGAGGTTCC |
| | | GGGGGTGGAGGCTCAGGAGGAGGGGGGTCCGACATCGTCATGACTCAG |
| | | TCGCCCTCAAGCGTCAGCGCGTCCGTCGGGGACAGAGTGATCATCACC |
| | | TGTCGGGCGTCCCAGGGAATTCGCAACTGGCTGGCCTGGTATCAGCAG |
| | | AAGCCCGGAAAGGCCCCCAACCTGTTGATCTACGCCGCCTCAAACCTC |
| | | CAATCCGGGGTGCCGAGCCGCTTCAGCGGCTCCGGTTCGGGTGCCGAT |
| | | TTCACTCTGACCATCTCCTCCCTGCAACCTGAAGATGTGGCTACCTAC |
| | | TACTGCCAAAAGTACAACTCCGCACCTTTTACTTTCGGACCGGGGACC |
| | | AAAGTGGACATTAAG |
| 149367-aa | 1089 | QVQLQESGPGLVKPSQTLSLTCTVSGGSISSGGYYWSWIRQHPGKGLE |
| VH | | WIGYIYYSGSTYYNPSLKSRVTISVDTSKNQFSLKLSSVTAADTAVYY |
| | | CARAGIAARLRGAFDIWGQGTMVTVSS |
| 149367-aa | 1090 | DIVMTQSPSSVSASVGDRVIITCRASQGIRNWLAWYQQKPGKAPNLLI |
| VL | | YAASNLQSGVPSRFSGSGSGADFTLTISSLQPEDVATYYCQKYNSAPF |
| | | TFGPGTKVDIK |
| 149367-aa | 1091 | MALPVTALLLPLALLLHAARPQVQLQESGPGLVKPSQTLSLTCTVSGG |
| Full CAR | | SISSGGYYWSWIRQHPGKGLEWIGYIYYSGSTYYNPSLKSRVTISVDT |
| | | SKNQFSLKLSSVTAADTAVYYCARAGIAARLRGAFDIWGQGTMVTVSS |
| | | GGGGSGGGGSGGGGSDIVMTQSPSSVSASVGDRVIITCRASQGIRNWL |
| | | AWYQQKPGKAPNLLIYAASNLQSGVPSRFSGSGSGADFTLTISSLQPE |
| | | DVATYYCQKYNSAPFTFGPGTKVDIKTTTPAPRPPTPAPTIASQPLSL |
| | | RPEACRPAAGGAVHTRGLDFACDIYIWAPLAGTCGVLLLSLVITLYCK |
| | | RGRKKLLYIFKQPFMRPVQTTQEEDGCSCRFPEEEEGGCELRVKFSRS |
| | | ADAPAYKQGQNQLYNELNLGRREEYDVLDKRRGRDPEMGGKPRRKNPQ |
| | | EGLYNELQKDKMAEAYSEIGMKGERRRGKGHDGLYQGLSTATKDTYDA |
| | | LHMQALPPR |
| 149367-nt | 1092 | ATGGCCCTCCCTGTCACCGCCCTGCTGCTTCCGCTGGCTCTTCTGCTC |
| Full CAR | | CACGCCGCTCGGCCCCAAGTGCAGCTTCAGGAGAGCGGCCCGGGACTC |
| | | GTGAAGCCGTCCCAGACCCTGTCCCTGACTTGCACCGTGTCGGGAGGA |
| | | AGCATCTCGAGCGGAGGCTACTATTGGTCGTGGATTCGGCAGCACCCT |
| | | GGAAAGGGCCTGGAATGGATCGGCTACATCTACTACTCCGGCTCGACC |
| | | TACTACAACCCATCGCTGAAGTCCAGAGTGACAATCTCAGTGGACACG |
| | | TCCAAGAATCAGTTCAGCCTGAAGCTCTCTTCCGTGACTGCGGCCGAC |
| | | ACCGCCGTGTACTACTGCGCACGCGCTGGAATTGCCGCCCGGCTGAGG |
| | | GGTGCCTTCGACATTTGGGGACAGGGCACCATGGTCACCGTGTCCTCC |
| | | GGCGGCGGAGGTTCCGGGGGTGGAGGCTCAGGAGGAGGGGGGTCCGAC |
| | | ATCGTCATGACTCAGTCGCCCTCAAGCGTCAGCGCGTCCGTCGGGGAC |
| | | AGAGTGATCATCACCTGTCGGGCGTCCCAGGGAATTCGCAACTGGCTG |
| | | GCCTGGTATCAGCAGAAGCCCGGAAAGGCCCCCAACCTGTTGATCTAC |
| | | GCCGCCTCAAACCTCCAATCCGGGGTGCCGAGCCGCTTCAGCGGCTCC |
| | | GGTTCGGGTGCCGATTTCACTCTGACCATCTCCTCCCTGCAACCTGAA |
| | | GATGTGGCTACCTACTACTGCCAAAAGTACAACTCCGCACCTTTTACT |
| | | TTCGGACCGGGGACCAAAGTGGACATTAAGACCACTACCCCAGCACCG |
| | | AGGCCACCCACCCCGGCTCCTACCATCGCCTCCCAGCCTCTGTCCCTG |
| | | CGTCCGGAGGCATGTAGACCCGCAGCTGGTGGGGCCGTGCATACCCGG |
| | | GGTCTTGACTTCGCCTGCGATATCTACATTTGGGCCCCTCTGGCTGGT |
| | | ACTTGCGGGGTCCTGCTGCTTTCACTCGTGATCACTCTTTACTGTAAG |
| | | CGCGGTCGGAAGAAGCTGCTGTACATCTTTAAGCAACCCTTCATGAGG |
| | | CCTGTGCAGACTACTCAAGAGGAGGACGGCTGTTCATGCCGGTTCCCA |
| | | GAGGAGGAGGAAGGCGGCTGCGAACTGCGCGTGAAATTCAGCCGCAGC |
| | | GCAGATGCTCCAGCCTACAAGCAGGGGCAGAACCAGCTCTACAACGAA |
| | | CTCAATCTTGGTCGGAGAGAGGAGTACGACGTGCTGGACAAGCGGAGA |
| | | GGACGGGACCCAGAAATGGGCGGGAAGCCGCGCAGAAAGAATCCCCAA |
| | | GAGGGCCTGTACAACGAGCTCCAAAAGGATAAGATGGCAGAAGCCTAT |
| | | AGCGAGATTGGTATGAAAGGGGAACGCAGAAGAGGCAAAGGCCACGAC |
| | | GGACTGTACCAGGGACTCAGCACCGCCACCAAGGACACCTATGACGCT |
| | | CTTCACATGCAGGCCCTGCCGCCTCGG |

149368

| | | |
|---|---|---|
| 149368-aa | 1093 | QVQLVQSGAEVKKPGSSVKVSCKASGGTFSSYAISWVRQAPGQGLEWM |
| ScFv | | GGIIPIFGTANYAQKFQGRVTITADESTSTAYMELSSLRSEDTAVYYC |
| domain | | ARRGGYQLLRWDVGLLRSAFDIWGQGTMVTVSSGGGGSGGGGSGGGGS |
| | | SYVLTQPPSVSVAPGQTARITCGGNNIGSKSVHWYQQKPGQAPVLVLY |
| | | GKNNRPSGVPDRFSGSRSGTTASLTITGAQAEDEADYYCSSRDSSGDH |
| | | LRVFGTGTKVTVL |
| 149368-nt | 1094 | CAAGTGCAGCTGGTCCAGTCGGGCGCCGAGGTCAAGAAGCCCGGGAGC |
| ScFv | | TCTGTGAAAGTGTCCTGCAAGGCCTCCGGGGGCACCTTTAGCTCCTAC |
| domain | | GCCATCTCCTGGGTCCGCCAAGCACCGGGTCAAGGCCTGGAGTGGATG |
| | | GGGGGAATTATCCCTATCTTCGGCACTGCCAACTACGCCCAGAAGTTC |
| | | CAGGGACGCGTGACCATTACCGCGGACGAATCCACCTCCACCGCTTAT |
| | | ATGGAGCTGTCCAGCTTGCGCTCGGAAGATACCGCCGTGTACTACTGC |
| | | GCCCGGAGGGGTGGATACCAGCTGCTGAGATGGGACGTGGGCCTCCTG |
| | | CGGTCGGCGTTCGACATCTGGGGCCAGGGCACTATGGTCACTGTGTCC |
| | | AGCGGAGGAGGCGGATCGGGAGGCGGCGGATCAGGGGGAGGCGGTTCC |
| | | AGCTACGTGCTTACTCAACCCCCTTCGGTGTCCGTGGCCCCGGGACAG |
| | | ACCGCCAGAATCACTTGCGGAGGAAACAACATTGGGTCCAAGAGCGTG |
| | | CATTGGTACCAGCAGAAGCCAGGACAGGCCCCTGTGCTGGTGCTCTAC |
| | | GGGAAGAACAATCGGCCCAGCGGAGTGCCGGACAGGTTCTCGGGTTCA |
| | | CGCTCCGGTACAACCGCTTCACTGACTATCACCGGGGCCCAGGCAGAG |
| | | GATGAAGCGGACTACTACTGTTCCTCCCGGGATTCATCCGGCGACCAC |
| | | CTCCGGGTGTTCGGAACCGGAACGAAGGTCACCGTGCTG |
| 149368-aa | 1095 | QVQLVQSGAEVKKPGSSVKVSCKASGGTFSSYAISWVRQAPGQGLEWM |
| VH | | GGIIPIFGTANYAQKFQGRVTITADESTSTAYMELSSLRSEDTAVYYC |
| | | ARRGGYQLLRWDVGLLRSAFDIWGQGTMVTVSS |
| 149368-aa | 1096 | SYVLTQPPSVSVAPGQTARITCGGNNIGSKSVHWYQQKPGQAPVLVLY |
| VL | | GKNNRPSGVPDRFSGSRSGTTASLTITGAQAEDEADYYCSSRDSSGDH |
| | | LRVFGTGTKVTVL |
| 149368-aa | 1097 | MALPVTALLLPLALLLHAARPQVQLVQSGAEVKKPGSSVKVSCKASGG |
| Full CAR | | TFSSYAISWVRQAPGQGLEWMGGIIPIFGTANYAQKFQGRVTITADES |
| | | TSTAYMELSSLRSEDTAVYYCARRGGYQLLRWDVGLLRSAFDIWGQGT |
| | | MVTVSSGGGGSGGGGSGGGGSSYVLTQPPSVSVAPGQTARITCGGNNI |
| | | GSKSVHWYQQKPGQAPVLVLYGKNNRPSGVPDRFSGSRSGTTASLTIT |
| | | GAQAEDEADYYCSSRDSSGDHLRVFGTGTKVTVLTTTPAPRPPTPAPT |
| | | IASQPLSLRPEACRPAAGGAVHTRGLDFACDIYIWAPLAGTCGVLLLS |
| | | LVITLYCKRGRKKLLYIFKQPFMRPVQTTQEEDGCSCRFPEEEEGGCE |
| | | LRVKFSRSADAPAYKQGQNQLYNELNLGRREEYDVLDKRRGRDPEMGG |
| | | KPRRKNPQEGLYNELQKDKMAEAYSEIGMKGERRRGKGHDGLYQGLST |
| | | ATKDTYDALHMQALPPR |
| 149368-nt | 1098 | ATGGCCCTCCCTGTCACCGCCCTGCTGCTTCCGCTGGCTCTTCTGCTC |
| Full CAR | | CACGCCGCTCGGCCCCAAGTGCAGCTGGTCCAGTCGGGCGCCGAGGTC |
| | | AAGAAGCCCGGGAGCTCTGTGAAAGTGTCCTGCAAGGCCTCCGGGGGC |
| | | ACCTTTAGCTCCTACGCCATCTCCTGGGTCCGCCAAGCACCGGGTCAA |
| | | GGCCTGGAGTGGATGGGGGGAATTATCCCTATCTTCGGCACTGCCAAC |
| | | TACGCCCAGAAGTTCCAGGGACGCGTGACCATTACCGCGGACGAATCC |
| | | ACCTCCACCGCTTATATGGAGCTGTCCAGCTTGCGCTCGGAAGATACC |
| | | GCCGTGTACTACTGCGCCCGGAGGGGTGGATACCAGCTGCTGAGATGG |
| | | GACGTGGGCCTCCTGCGGTCGGCGTTCGACATCTGGGGCCAGGGCACT |
| | | ATGGTCACTGTGTCCAGCGGAGGAGGCGGATCGGGAGGCGGCGGATCA |
| | | GGGGGAGGCGGTTCCAGCTACGTGCTTACTCAACCCCCTTCGGTGTCC |
| | | GTGGCCCCGGGACAGACCGCCAGAATCACTTGCGGAGGAAACAACATT |
| | | GGGTCCAAGAGCGTGCATTGGTACCAGCAGAAGCCAGGACAGGCCCCT |
| | | GTGCTGGTGCTCTACGGGAAGAACAATCGGCCCAGCGGAGTGCCGGAC |
| | | AGGTTCTCGGGTTCACGCTCCGGTACAACCGCTTCACTGACTATCACC |
| | | GGGGCCCAGGCAGAGGATGAAGCGGACTACTACTGTTCCTCCCGGGAT |
| | | TCATCCGGCGACCACCTCCGGGTGTTCGGAACCGGAACGAAGGTCACC |
| | | GTGCTGACCACTACCCCAGCACCGAGGCCACCCACCCCGGCTCCTACC |
| | | ATCGCCTCCCAGCCTCTGTCCCTGCGTCCGGAGGCATGTAGACCCGCA |
| | | GCTGGTGGGGCCGTGCATACCCGGGGTCTTGACTTCGCCTGCGATATC |
| | | TACATTTGGGCCCCTCTGGCTGGTACTTGCGGGGTCCTGCTGCTTTCA |
| | | CTCGTGATCACTCTTTACTGTAAGCGCGGTCGGAAGAAGCTGCTGTAC |
| | | ATCTTTAAGCAACCCTTCATGAGGCCTGTGCAGACTACTCAAGAGGAG |
| | | GACGGCTGTTCATGCCGGTTCCCAGAGGAGGAGGAAGGCGGCTGCGAA |
| | | CTGCGCGTGAAATTCAGCCGCAGCGCAGATGCTCCAGCCTACAAGCAG |
| | | GGGCAGAACCAGCTCTACAACGAACTCAATCTTGGTCGGAGAGAGGAG |
| | | TACGACGTGCTGGACAAGCGGAGAGGACGGGACCCAGAAATGGGCGGG |
| | | AAGCCGCGCAGAAAGAATCCCCAAGAGGGCCTGTACAACGAGCTCCAA |
| | | AAGGATAAGATGGCAGAAGCCTATAGCGAGATTGGTATGAAAGGGGAA |
| | | CGCAGAAGAGGCAAAGGCCACGACGGACTGTACCAGGGACTCAGCACC |
| | | GCCACCAAGGACACCTATGACGCTCTTCACATGCAGGCCCTGCCGCCT |
| | | CGG |

149369

| | | |
|---|---|---|
| 149369-aa | 1099 | EVQLQQSGPGLVKPSQTLSLTCAISGDSVSSNSAAWNWIRQSPSRGLE |
| ScFv | | WLGRTYYRSKWYSFYAISLKSRIIINPDTSKNQFSLQLKSVTPEDTAV |
| domain | | YYCARSSPEGLFLYWFDPWGQGTLVTVSSGGDGSGGGGSGGGGSSSEL |
| | | TQDPAVSVALGQTIRITCQGDSLGNYYATWYQQKPGQAPVLVIYGTNN |
| | | RPSGIPDRFSASSSGNTASLTITGAQAEDEADYYCNSRDSSGHHLLFG |
| | | TGTKVTVL |
| 149369-nt | 1100 | GAAGTGCAGCTCCAACAGTCAGGACCGGGGCTCGTGAAGCCATCCCAG |
| ScFv | | ACCCTGTCCCTGACTTGTGCCATCTCGGGAGATAGCGTGTCATCGAAC |
| domain | | TCCGCCGCCTGGAACTGGATTCGGCAGAGCCCGTCCCGCGGACTGGAG |
| | | TGGCTTGGAAGGACCTACTACCGGTCCAAGTGGTACTCTTTCTACGCG |
| | | ATCTCGCTGAAGTCCCGCATTATCATTAACCCTGATACCTCCAAGAAT |
| | | CAGTTCTCCCTCCAACTGAAATCCGTCACCCCCGAGGACACAGCAGTG |
| | | TATTACTGCGCACGGAGCAGCCCCGAAGGACTGTTCCTGTATTGGTTT |
| | | GACCCCTGGGGCCAGGGGACTCTTGTGACCGTGTCGAGCGGCGGAGAT |
| | | GGGTCCGGTGGCGGTGGTTCGGGGGGCGGCGGATCATCATCCGAACTG |
| | | ACCCAGGACCCGGCTGTGTCCGTGGCGCTGGGACAAACCATCCGCATT |
| | | ACGTGCCAGGGAGACTCCCTGGGCAACTACTACGCCACTTGGTACCAG |
| | | CAGAAGCCGGGCCAAGCCCCTGTGTTGGTCATCTACGGGACCAACAAC |
| | | AGACCTTCCGGCATCCCCGACCGGTTCAGCGCTTCGTCCTCCGGCAAC |
| | | ACTGCCAGCCTGACCATCACTGGAGCGCAGGCCGAAGATGAGGCCGAC |
| | | TACTACTGCAACAGCAGAGACTCCTCGGGTCATCACCTCTTGTTCGGA |
| | | ACTGGAACCAAGGTCACCGTGCTG |
| 149369-aa | 1101 | EVQLQQSGPGLVKPSQTLSLTCAISGDSVSSNSAAWNWIRQSPSRGLE |
| VH | | WLGRTYYRSKWYSFYAISLKSRIIINPDTSKNQFSLQLKSVTPEDTAV |
| | | YYCARSSPEGLFLYWFDPWGQGTLVTVSS |
| 149369-aa | 1102 | SSELTQDPAVSVALGQTIRITCQGDSLGNYYATWYQQKPGQAPVLVIY |
| VL | | GTNNRPSGIPDRFSASSSGNTASLTITGAQAEDEADYYCNSRDSSGHH |
| | | LLFGTGTKVTVL |
| 149369-aa | 1103 | MALPVTALLLPLALLLHAARPEVQLQQSGPGLVKPSQTLSLTCAISGD |
| Full CAR | | SVSSNSAAWNWIRQSPSRGLEWLGRTYYRSKWYSFYAISLKSRIIINP |
| | | DTSKNQFSLQLKSVTPEDTAVYYCARSSPEGLFLYWFDPWGQGTLVTV |
| | | SSGGDGSGGGGSGGGGSSSELTQDPAVSVALGQTIRITCQGDSLGNYY |
| | | ATWYQQKPGQAPVLVIYGTNNRPSGIPDRFSASSSGNTASLTITGAQA |
| | | EDEADYYCNSRDSSGHHLLFGTGTKVTVLTTTPAPRPPTPAPTIASQP |
| | | LSLRPEACRPAAGGAVHTRGLDFACDIYIWAPLAGTCGVLLLSLVITL |
| | | YCKRGRKKLLYIFKQPFMRPVQTTQEEDGCSCRFPEEEEGGCELRVKF |
| | | SRSADAPAYKQGQNQLYNELNLGRREEYDVLDKRRGRDPEMGGKPRRK |
| | | NPQEGLYNELQKDKMAEAYSEIGMKGERRRGKGHDGLYQGLSTATKDT |
| | | YDALHMQALPPR |
| 149369-nt | 1104 | ATGGCCCTCCCTGTCACCGCCCTGCTGCTTCCGCTGGCTCTTCTGCTC |
| Full CAR | | CACGCCGCTCGGCCCGAAGTGCAGCTCCAACAGTCAGGACCGGGGCTC |
| | | GTGAAGCCATCCCAGACCCTGTCCCTGACTTGTGCCATCTCGGGAGAT |
| | | AGCGTGTCATCGAACTCCGCCGCCTGGAACTGGATTCGGCAGAGCCCG |
| | | TCCCGCGGACTGGAGTGGCTTGGAAGGACCTACTACCGGTCCAAGTGG |
| | | TACTCTTTCTACGCGATCTCGCTGAAGTCCCGCATTATCATTAACCCT |
| | | GATACCTCCAAGAATCAGTTCTCCCTCCAACTGAAATCCGTCACCCCC |
| | | GAGGACACAGCAGTGTATTACTGCGCACGGAGCAGCCCCGAAGGACTG |
| | | TTCCTGTATTGGTTTGACCCCTGGGGCCAGGGGACTCTTGTGACCGTG |
| | | TCGAGCGGCGGAGATGGGTCCGGTGGCGGTGGTTCGGGGGGCGGCGGA |
| | | TCATCATCCGAACTGACCCAGGACCCGGCTGTGTCCGTGGCGCTGGGA |
| | | CAAACCATCCGCATTACGTGCCAGGGAGACTCCCTGGGCAACTACTAC |
| | | GCCACTTGGTACCAGCAGAAGCCGGGCCAAGCCCCTGTGTTGGTCATC |
| | | TACGGGACCAACAACAGACCTTCCGGCATCCCCGACCGGTTCAGCGCT |
| | | TCGTCCTCCGGCAACACTGCCAGCCTGACCATCACTGGAGCGCAGGCC |
| | | GAAGATGAGGCCGACTACTACTGCAACAGCAGAGACTCCTCGGGTCAT |
| | | CACCTCTTGTTCGGAACTGGAACCAAGGTCACCGTGCTGACCACTACC |
| | | CCAGCACCGAGGCCACCCACCCCGGCTCCTACCATCGCCTCCCAGCCT |
| | | CTGTCCCTGCGTCCGGAGGCATGTAGACCCGCAGCTGGTGGGGCCGTG |
| | | CATACCCGGGGTCTTGACTTCGCCTGCGATATCTACATTTGGGCCCCT |
| | | CTGGCTGGTACTTGCGGGGTCCTGCTGCTTTCACTCGTGATCACTCTT |
| | | TACTGTAAGCGCGGTCGGAAGAAGCTGCTGTACATCTTTAAGCAACCC |
| | | TTCATGAGGCCTGTGCAGACTACTCAAGAGGAGGACGGCTGTTCATGC |
| | | CGGTTCCCAGAGGAGGAGGAAGGCGGCTGCGAACTGCGCGTGAAATTC |
| | | AGCCGCAGCGCAGATGCTCCAGCCTACAAGCAGGGGCAGAACCAGCTC |
| | | TACAACGAACTCAATCTTGGTCGGAGAGAGGAGTACGACGTGCTGGAC |
| | | AAGCGGAGAGGACGGGACCCAGAAATGGGCGGGAAGCCGCGCAGAAAG |
| | | AATCCCCAAGAGGGCCTGTACAACGAGCTCCAAAAGGATAAGATGGCA |
| | | GAAGCCTATAGCGAGATTGGTATGAAAGGGGAACGCAGAAGAGGCAAA |
| | | GGCCACGACGGACTGTACCAGGGACTCAGCACCGCCACCAAGGACACC |
| | | TATGACGCTCTTCACATGCAGGCCCTGCCGCCTCGG |

BCMA_EBB-C1978-A4

| | | |
|---|---|---|
| BCMA_EBB- | 1105 | EVQLVESGGGLVQPGGSLRLSCAASGFTFSSYAMSWVRQAPGKGLEWV |
| C1978-A4- | | SAISGSGGSTYYADSVKGRFTISRDNSKNTLYLQMNSLRAEDTAVYYC |
| aa | | AKVEGSGSLDYWGQGTLVTVSSGGGGSGGGGSGGGGSEIVMTQSPGTL |
| ScFv | | SLSPGERATLSCRASQSVSSAYLAWYQQKPGQPPRLLISGASTRATGI |
| domain | | PDRFGGSGSGTDFTLTISRLEPEDFAVYYCQHYGSSFNGSSLFTFGQG |
| | | TRLEIK |
| BCMA_EBB- | 1106 | GAAGTGCAGCTCGTGGAGTCAGGAGGCGGCCTGGTCCAGCCGGGAGGG |
| C1978-A4- | | TCCCTTAGACTGTCATGCGCCGCAAGCGGATTCACTTTCTCCTCCTAT |
| nt | | GCCATGAGCTGGGTCCGCCAAGCCCCCGGAAAGGGACTGGAATGGGTG |
| ScFv | | TCCGCCATCTCGGGGTCTGGAGGCTCAACTTACTACGCTGACTCCGTG |
| domain | | AAGGGACGGTTCACCATTAGCCGCGACAACTCCAAGAACACCCTCTAC |
| | | CTCCAAATGAACTCCCTGCGGGCCGAGGATACCGCCGTCTACTACTGC |
| | | GCCAAAGTGGAAGGTTCAGGATCGCTGGACTACTGGGGACAGGGTACT |
| | | CTCGTGACCGTGTCATCGGGCGGAGGAGGTTCCGGCGGTGGCGGCTCC |
| | | GGCGGCGGAGGGTCGGAGATCGTGATGACCCAGAGCCCTGGTACTCTG |
| | | AGCCTTTCGCCGGGAGAAAGGGCCACCCTGTCCTGCCGCGCTTCCCAA |
| | | TCCGTGTCCTCCGCGTACTTGGCGTGGTACCAGCAGAAGCCGGGACAG |
| | | CCCCCTCGGCTGCTGATCAGCGGGGCCAGCACCCGGGCAACCGGAATC |
| | | CCAGACAGATTCGGGGGTTCCGGCAGCGGCACAGATTTCACCCTGACT |
| | | ATTTCGAGGTTGGAGCCCGAGGACTTTGCGGTGTATTACTGTCAGCAC |
| | | TACGGGTCGTCCTTTAATGGCTCCAGCCTGTTCACGTTCGGACAGGGG |
| | | ACCCGCCTGGAAATCAAG |
| BCMA_EBB- | 1107 | EVQLVESGGGLVQPGGSLRLSCAASGFTFSSYAMSWVRQAPGKGLEWV |
| C1978-A4- | | SAISGSGGSTYYADSVKGRFTISRDNSKNTLYLQMNSLRAEDTAVYYC |
| aa | | AKVEGSGSLDYWGQGTLVTVSS |
| VH | | |
| BCMA_EBB- | 1108 | EIVMTQSPGTLSLSPGERATLSCRASQSVSSAYLAWYQQKPGQPPRLL |
| C1978-A4- | | ISGASTRATGIPDRFGGSGSGTDFTLTISRLEPEDFAVYYCQHYGSSF |
| aa | | NGSSLFTFGQGTRLEIK |
| VL | | |
| BCMA_EBB- | 1109 | MALPVTALLLPLALLLHAARPEVQLVESGGGLVQPGGSLRLSCAASGF |
| C1978-A4- | | TFSSYAMSWVRQAPGKGLEWVSAISGSGGSTYYADSVKGRFTISRDNS |
| aa | | KNTLYLQMNSLRAEDTAVYYCAKVEGSGSLDYWGQGTLVTVSSGGGGS |
| Full CART | | GGGGSGGGGSEIVMTQSPGTLSLSPGERATLSCRASQSVSSAYLAWYQ |
| | | QKPGQPPRLLISGASTRATGIPDRFGGSGSGTDFTLTISRLEPEDFAV |
| | | YYCQHYGSSFNGSSLFTFGQGTRLEIKTTTPAPRPPTPAPTIASQPLS |
| | | LRPEACRPAAGGAVHTRGLDFACDIYIWAPLAGTCGVLLLSLVITLYC |
| | | KRGRKKLLYIFKQPFMRPVQTTQEEDGCSCRFPEEEEGGCELRVKFSR |
| | | SADAPAYKQGQNQLYNELNLGRREEYDVLDKRRGRDPEMGGKPRRKNP |
| | | QEGLYNELQKDKMAEAYSEIGMKGERRRGKGHDGLYQGLSTATKDTYD |
| | | ALHMQALPPR |
| BCMA_EBB- | 1110 | ATGGCCCTCCCTGTCACCGCCCTGCTGCTTCCGCTGGCTCTTCTGCTC |
| C1978-A4- | | CACGCCGCTCGGCCCGAAGTGCAGCTCGTGGAGTCAGGAGGCGGCCTG |
| nt | | GTCCAGCCGGGAGGGTCCCTTAGACTGTCATGCGCCGCAAGCGGATTC |
| Full CART | | ACTTTCTCCTCCTATGCCATGAGCTGGGTCCGCCAAGCCCCCGGAAAG |
| | | GGACTGGAATGGGTGTCCGCCATCTCGGGGTCTGGAGGCTCAACTTAC |
| | | TACGCTGACTCCGTGAAGGGACGGTTCACCATTAGCCGCGACAACTCC |
| | | AAGAACACCCTCTACCTCCAAATGAACTCCCTGCGGGCCGAGGATACC |
| | | GCCGTCTACTACTGCGCCAAAGTGGAAGGTTCAGGATCGCTGGACTAC |
| | | TGGGGACAGGGTACTCTCGTGACCGTGTCATCGGGCGGAGGAGGTTCC |
| | | GGCGGTGGCGGCTCCGGCGGCGGAGGGTCGGAGATCGTGATGACCCAG |
| | | AGCCCTGGTACTCTGAGCCTTTCGCCGGGAGAAAGGGCCACCCTGTCC |
| | | TGCCGCGCTTCCCAATCCGTGTCCTCCGCGTACTTGGCGTGGTACCAG |
| | | CAGAAGCCGGGACAGCCCCCTCGGCTGCTGATCAGCGGGGCCAGCACC |
| | | CGGGCAACCGGAATCCCAGACAGATTCGGGGGTTCCGGCAGCGGCACA |
| | | GATTTCACCCTGACTATTTCGAGGTTGGAGCCCGAGGACTTTGCGGTG |
| | | TATTACTGTCAGCACTACGGGTCGTCCTTTAATGGCTCCAGCCTGTTC |
| | | ACGTTCGGACAGGGGACCCGCCTGGAAATCAAGACCACTACCCCAGCA |
| | | CCGAGGCCACCCACCCCGGCTCCTACCATCGCCTCCCAGCCTCTGTCC |
| | | CTGCGTCCGGAGGCATGTAGACCCGCAGCTGGTGGGGCCGTGCATACC |
| | | CGGGGTCTTGACTTCGCCTGCGATATCTACATTTGGGCCCCTCTGGCT |
| | | GGTACTTGCGGGGTCCTGCTGCTTTCACTCGTGATCACTCTTTACTGT |
| | | AAGCGCGGTCGGAAGAAGCTGCTGTACATCTTTAAGCAACCCTTCATG |
| | | AGGCCTGTGCAGACTACTCAAGAGGAGGACGGCTGTTCATGCCGGTTC |
| | | CCAGAGGAGGAGGAAGGCGGCTGCGAACTGCGCGTGAAATTCAGCCGC |
| | | AGCGCAGATGCTCCAGCCTACAAGCAGGGGCAGAACCAGCTCTACAAC |
| | | GAACTCAATCTTGGTCGGAGAGAGGAGTACGACGTGCTGGACAAGCGG |
| | | AGAGGACGGGACCCAGAAATGGGCGGGAAGCCGCGCAGAAAGAATCCC |
| | | CAAGAGGGCCTGTACAACGAGCTCCAAAAGGATAAGATGGCAGAAGCC |
| | | TATAGCGAGATTGGTATGAAAGGGGAACGCAGAAGAGGCAAAGGCCAC |
| | | GACGGACTGTACCAGGGACTCAGCACCGCCACCAAGGACACCTATGAC |
| | | GCTCTTCACATGCAGGCCCTGCCGCCTCGG |

BCMA_EBB-C1978-G1

| | | |
|---|---|---|
| BCMA_EBB- | 1111 | EVQLVETGGGLVQPGGSLRLSCAASGITFSRYPMSWVRQAPGKG |
| C1978-G1- | | LEWVSGISDSGVSTYYADSAKGRFTISRDNSKNTLFLQMSSLRDE |
| aa | | DTAVYYCVTRAGSEASDIWGQGTMVTVSSGGGGSGGGGSGGG |
| ScFv | | GSEIVLTQSPATLSLSPGERATLSCRASQSVSNSLAWYQQKPGQA |
| domain | | PRLLIYDASSRATGIPDRFSGSGSGTDFTLTISRLEPEDFAIYYCQQ |
| | | FGTSSGLTFGGGTKLEIK |
| BCMA_EBB- | 1112 | GAAGTGCAACTGGTGGAAACCGGTGGCGGCCTGGTGCAGCCTGGAGGA |
| C1978-G1- | | TCATTGAGGCTGTCATGCGCGGCCAGCGGTATTACCTTCTCCCGGTAC |
| nt | | CCCATGTCCTGGGTCAGACAGGCCCCGGGGAAAGGGCTTGAATGGGTG |
| ScFv | | TCCGGGATCTCGGACTCCGGTGTCAGCACTTACTACGCCGACTCCGCC |
| domain | | AAGGGACGCTTCACCATTTCCCGGGACAACTCGAAGAACACCCTGTTC |
| | | CTCCAAATGAGCTCCCTCCGGGACGAGGATACTGCAGTGTACTACTGC |
| | | GTGACCCGCGCCGGGTCCGAGGCGTCTGACATTTGGGGACAGGGCACT |
| | | ATGGTCACCGTGTCGTCCGGCGGAGGGGGCTCGGGAGGCGGTGGCAGC |
| | | GGAGGAGGAGGGTCCGAGATCGTGCTGACCCAATCCCCGGCCACCCTC |
| | | TCGCTGAGCCCTGGAGAAAGGGCAACCTTGTCCTGTCGCGCGAGCCAG |
| | | TCCGTGAGCAACTCCCTGGCCTGGTACCAGCAGAAGCCCGGACAGGCT |
| | | CCGAGACTTCTGATCTACGACGCTTCGAGCCGGGCCACTGGAATCCCC |
| | | GACCGCTTTTCGGGGTCCGGCTCAGGAACCGATTTCACCCTGACAATC |
| | | TCACGGCTGGAGCCAGAGGATTTCGCCATCTATTACTGCCAGCAGTTC |
| | | GGTACTTCCTCCGGCCTGACTTTCGGAGGCGGCACGAAGCTCGAAATC |
| | | AAG |
| BCMA_EBB- | 1113 | EVQLVETGGGLVQPGGSLRLSCAASGITFSRYPMSWVRQAPGKGLEWV |
| C1978-G1- | | SGISDSGVSTYYADSAKGRFTISRDNSKNTLFLQMSSLRDEDTAVYYC |
| aa | | VTRAGSEASDIWGQGTMVTVSS |
| VH | | |
| BCMA_EBB- | 1114 | EIVLTQSPATLSLSPGERATLSCRASQSVSNSLAWYQQKPGQAPRLLI |
| C1978-G1- | | YDASSRATGIPDRFSGSGSGTDFTLTISRLEPEDFAIYYCQQFGTSSG |
| aa | | LTFGGGTKLEIK |
| VL | | |
| BCMA_EBB- | 1115 | MALPVTALLLPLALLLHAARPEVQLVETGGGLVQPGGSLRLSCA |
| C1978-G1- | | ASGITFSRYPMSWVRQAPGKGLEWVSGISDSGVSTYYADSAKGR |
| aa | | FTISRDNSKNTLFLQMSSLRDEDTAVYYCVTRAGSEASDIWGQG |
| Full CART | | TMVTVSSGGGGSGGGGSGGGGSEIVLTQSPATLSLSPGERATLSC |
| | | RASQSVSNSLAWYQQKPGQAPRLLIYDASSRATGIPDRFSGSGSG |
| | | TDFTLTISRLEPEDFAIYYCQQFGTSSGLTFGGGTKLEIKTTTPAPR |
| | | PPTPAPTIASQPLSLRPEACRPAAGGAVHTRGLDFACDIYIWAPL |
| | | AGTCGVLLLSLVITLYCKRGRKKLLYIFKQPFMRPVQTTQEEDG |
| | | CSCRFPEEEEGGCELRVKFSRSADAPAYKQGQNQLYNELNLGRR |
| | | EEYDVLDKRRGRDPEMGGKPRRKNPQEGLYNELQKDKMAEAY |
| | | SEIGMKGERRRGKGHDGLYQGLSTATKDTYDALHMQALPPR |
| BCMA_EBB- | 1116 | ATGGCCCTCCCTGTCACCGCCCTGCTGCTTCCGCTGGCTCTTCTGCTC |
| C1978-G1- | | CACGCCGCTCGGCCCGAAGTGCAACTGGTGGAAACCGGTGGCGGCCTG |
| nt | | GTGCAGCCTGGAGGATCATTGAGGCTGTCATGCGCGGCCAGCGGTATT |
| Full CART | | ACCTTCTCCCGGTACCCCATGTCCTGGGTCAGACAGGCCCCGGGGAAA |
| | | GGGCTTGAATGGGTGTCCGGGATCTCGGACTCCGGTGTCAGCACTTAC |
| | | TACGCCGACTCCGCCAAGGGACGCTTCACCATTTCCCGGGACAACTCG |
| | | AAGAACACCCTGTTCCTCCAAATGAGCTCCCTCCGGGACGAGGATACT |
| | | GCAGTGTACTACTGCGTGACCCGCGCCGGGTCCGAGGCGTCTGACATT |
| | | TGGGGACAGGGCACTATGGTCACCGTGTCGTCCGGCGGAGGGGGCTCG |
| | | GGAGGCGGTGGCAGCGGAGGAGGAGGGTCCGAGATCGTGCTGACCCAA |
| | | TCCCCGGCCACCCTCTCGCTGAGCCCTGGAGAAAGGGCAACCTTGTCC |
| | | TGTCGCGCGAGCCAGTCCGTGAGCAACTCCCTGGCCTGGTACCAGCAG |
| | | AAGCCCGGACAGGCTCCGAGACTTCTGATCTACGACGCTTCGAGCCGG |
| | | GCCACTGGAATCCCCGACCGCTTTTCGGGGTCCGGCTCAGGAACCGAT |
| | | TTCACCCTGACAATCTCACGGCTGGAGCCAGAGGATTTCGCCATCTAT |
| | | TACTGCCAGCAGTTCGGTACTTCCTCCGGCCTGACTTTCGGAGGCGGC |
| | | ACGAAGCTCGAAATCAAGACCACTACCCCAGCACCGAGGCCACCCACC |
| | | CCGGCTCCTACCATCGCCTCCCAGCCTCTGTCCCTGCGTCCGGAGGCA |
| | | TGTAGACCCGCAGCTGGTGGGGCCGTGCATACCCGGGGTCTTGACTTC |
| | | GCCTGCGATATCTACATTTGGGCCCCTCTGGCTGGTACTTGCGGGGTC |
| | | CTGCTGCTTTCACTCGTGATCACTCTTTACTGTAAGCGCGGTCGGAAG |
| | | AAGCTGCTGTACATCTTTAAGCAACCCTTCATGAGGCCTGTGCAGACT |
| | | ACTCAAGAGGAGGACGGCTGTTCATGCCGGTTCCCAGAGGAGGAGGAA |
| | | GGCGGCTGCGAACTGCGCGTGAAATTCAGCCGCAGCGCAGATGCTCCA |
| | | GCCTACAAGCAGGGGCAGAACCAGCTCTACAACGAACTCAATCTTGGT |
| | | CGGAGAGAGGAGTACGACGTGCTGGACAAGCGGAGAGGACGGGACCCA |
| | | GAAATGGGCGGGAAGCCGCGCAGAAAGAATCCCCAAGAGGGCCTGTAC |
| | | AACGAGCTCCAAAAGGATAAGATGGCAGAAGCCTATAGCGAGATTGGT |
| | | ATGAAAGGGGAACGCAGAAGAGGCAAAGGCCACGACGGACTGTACCAG |
| | | GGACTCAGCACCGCCACCAAGGACACCTATGACGCTCTTCACATGCAG |
| | | GCCCTGCCGCCTCGG |

BCMA_EBB-C1979-C1

| | | |
|---|---|---|
| BCMA_EBB- | 1117 | QVQLVESGGGLVQPGGSLRLSCAASGFTFSSYAMSWVRQAPGKGLEWV |
| C1979-C1- | | SAISGSGGSTYYADSVKGRFTISRDNAKNSLYLQMNSLRAEDTAIYYC |
| aa | | ARATYKRELRYYYGMDVWGQGTMVTVSSGGGGSGGGGSGGGGSEIVMT |
| ScFv | | QSPGTVSLSPGERATLSCRASQSVSSSFLAWYQQKPGQAPRLLIYGAS |
| domain | | SRATGIPDRFSGSGSGTDFTLTISRLEPEDSAVYYCQQYHSSPSWTFG |
| | | QGTRLEIK |
| BCMA_EBB- | 1118 | CAAGTGCAGCTCGTGGAATCGGGTGGCGGACTGGTGCAGCCGGGGGGC |
| C1979-C1- | | TCACTTAGACTGTCCTGCGCGGCCAGCGGATTCACTTTCTCCTCCTAC |
| nt | | GCCATGTCCTGGGTCAGACAGGCCCCTGGAAAGGGCCTGGAATGGGTG |
| ScFv | | TCCGCAATCAGCGGCAGCGGCGGCTCGACCTATTACGCGGATTCAGTG |
| domain | | AAGGGCAGATTCACCATTTCCCGGGACAACGCCAAGAACTCCTTGTAC |
| | | CTTCAAATGAACTCCCTCCGCGCGGAAGATACCGCAATCTACTACTGC |
| | | GCTCGGGCCACTTACAAGAGGGAACTGCGCTACTACTACGGGATGGAC |
| | | GTCTGGGGCCAGGGAACCATGGTCACCGTGTCCAGCGGAGGAGGAGGA |
| | | TCGGGAGGAGGCGGTAGCGGGGGTGGAGGGTCGGAGATCGTGATGACC |
| | | CAGTCCCCCGGCACTGTGTCGCTGTCCCCCGGCGAACGGGCCACCCTG |
| | | TCATGTCGGGCCAGCCAGTCAGTGTCGTCAAGCTTCCTCGCCTGGTAC |
| | | CAGCAGAAACCGGGACAAGCTCCCCGCCTGCTGATCTACGGAGCCAGC |
| | | AGCCGGGCCACCGGTATTCCTGACCGGTTCTCCGGTTCGGGGTCCGGG |
| | | ACCGACTTTACTCTGACTATCTCTCGCCTCGAGCCAGAGGACTCCGCC |
| | | GTGTATTACTGCCAGCAGTACCACTCCTCCCCGTCCTGGACGTTCGGA |
| | | CAGGGCACAAGGCTGGAGATTAAG |
| BCMA_EBB- | 1119 | QVQLVESGGGLVQPGGSLRLSCAASGFTFSSYAMSWVRQAPGKGLEWV |
| C1979-C1- | | SAISGSGGSTYYADSVKGRFTISRDNAKNSLYLQMNSLRAEDTAIYYC |
| aa | | ARATYKRELRYYYGMDVWGQGTMVTVSS |
| VH | | |
| BCMA_EBB- | 1120 | EIVMTQSPGTVSLSPGERATLSCRASQSVSSSFLAWYQQKPGQAPRLL |
| C1979-C1- | | IYGASSRATGIPDRFSGSGSGTDFTLTISRLEPEDSAVYYCQQYHSSP |
| aa | | SWTFGQGTRLEIK |
| VL | | |
| BCMA_EBB- | 1121 | MALPVTALLLPLALLLHAARPQVQLVESGGGLVQPGGSLRLSCAASGF |
| C1979-C1- | | TFSSYAMSWVRQAPGKGLEWVSAISGSGGSTYYADSVKGRFTISRDNA |
| aa | | KNSLYLQMNSLRAEDTAIYYCARATYKRELRYYYGMDVWGQGTMVTVS |
| Full CART | | SGGGGSGGGGSGGGGSEIVMTQSPGTVSLSPGERATLSCRASQSVSSS |
| | | FLAWYQQKPGQAPRLLIYGASSRATGIPDRFSGSGSGTDFTLTISRLE |
| | | PEDSAVYYCQQYHSSPSWTFGQGTRLEIKTTTPAPRPPTPAPTIASQP |
| | | LSLRPEACRPAAGGAVHTRGLDFACDIYIWAPLAGTCGVLLLSLVITL |
| | | YCKRGRKKLLYIFKQPFMRPVQTTQEEDGCSCRFPEEEEGGCELRVKF |
| | | SRSADAPAYKQGQNQLYNELNLGRREEYDVLDKRRGRDPEMGGKPRRK |
| | | NPQEGLYNELQKDKMAEAYSEIGMKGERRRGKGHDGLYQGLSTATKDT |
| | | YDALHMQALPPR |
| BCMA_EBB- | 1122 | ATGGCCCTCCCTGTCACCGCCCTGCTGCTTCCGCTGGCTCTTCTGCTC |
| C1979-C1- | | CACGCCGCTCGGCCCCAAGTGCAGCTCGTGGAATCGGGTGGCGGACTG |
| nt | | GTGCAGCCGGGGGGCTCACTTAGACTGTCCTGCGCGGCCAGCGGATTC |
| Full CART | | ACTTTCTCCTCCTACGCCATGTCCTGGGTCAGACAGGCCCCTGGAAAG |
| | | GGCCTGGAATGGGTGTCCGCAATCAGCGGCAGCGGCGGCTCGACCTAT |
| | | TACGCGGATTCAGTGAAGGGCAGATTCACCATTTCCCGGGACAACGCC |
| | | AAGAACTCCTTGTACCTTCAAATGAACTCCCTCCGCGCGGAAGATACC |
| | | GCAATCTACTACTGCGCTCGGGCCACTTACAAGAGGGAACTGCGCTAC |
| | | TACTACGGGATGGACGTCTGGGGCCAGGGAACCATGGTCACCGTGTCC |
| | | AGCGGAGGAGGAGGATCGGGAGGAGGCGGTAGCGGGGGTGGAGGGTCG |
| | | GAGATCGTGATGACCCAGTCCCCCGGCACTGTGTCGCTGTCCCCCGGC |
| | | GAACGGGCCACCCTGTCATGTCGGGCCAGCCAGTCAGTGTCGTCAAGC |
| | | TTCCTCGCCTGGTACCAGCAGAAACCGGGACAAGCTCCCCGCCTGCTG |
| | | ATCTACGGAGCCAGCAGCCGGGCCACCGGTATTCCTGACCGGTTCTCC |
| | | GGTTCGGGGTCCGGGACCGACTTTACTCTGACTATCTCTCGCCTCGAG |
| | | CCAGAGGACTCCGCCGTGTATTACTGCCAGCAGTACCACTCCTCCCCG |
| | | TCCTGGACGTTCGGACAGGGCACAAGGCTGGAGATTAAGACCACTACC |
| | | CCAGCACCGAGGCCACCCACCCCGGCTCCTACCATCGCCTCCCAGCCT |
| | | CTGTCCCTGCGTCCGGAGGCATGTAGACCCGCAGCTGGTGGGGCCGTG |
| | | CATACCCGGGGTCTTGACTTCGCCTGCGATATCTACATTTGGGCCCCT |
| | | CTGGCTGGTACTTGCGGGGTCCTGCTGCTTTCACTCGTGATCACTCTT |
| | | TACTGTAAGCGCGGTCGGAAGAAGCTGCTGTACATCTTTAAGCAACCC |
| | | TTCATGAGGCCTGTGCAGACTACTCAAGAGGAGGACGGCTGTTCATGC |
| | | CGGTTCCCAGAGGAGGAGGAAGGCGGCTGCGAACTGCGCGTGAAATTC |
| | | AGCCGCAGCGCAGATGCTCCAGCCTACAAGCAGGGGCAGAACCAGCTC |
| | | TACAACGAACTCAATCTTGGTCGGAGAGAGGAGTACGACGTGCTGGAC |
| | | AAGCGGAGAGGACGGGACCCAGAAATGGGCGGGAAGCCGCGCAGAAAG |
| | | AATCCCCAAGAGGGCCTGTACAACGAGCTCCAAAAGGATAAGATGGCA |
| | | GAAGCCTATAGCGAGATTGGTATGAAAGGGGAACGCAGAAGAGGCAAA |
| | | GGCCACGACGGACTGTACCAGGGACTCAGCACCGCCACCAAGGACACC |
| | | TATGACGCTCTTCACATGCAGGCCCTGCCGCCTCGG |

BCMA_EBB-C1978-C7

| | | |
|---|---|---|
| BCMA_EBB- | 1123 | EVQLVETGGGLVQPGGSLRLSCAASGFTFSSYAMSWVRQAPGKGLEWV |
| C1978-C7- | | SAISGSGGSTYYADSVKGRFTISRDNSKNTLYLQMNTLKAEDTAVYYC |
| aa | | ARATYKRELRYYYGMDVWGQGTTVTVSSGGGGSGGGGSGGGGSEIVLT |
| ScFv | | QSPSTLSLSPGESATLSCRASQSVSTTFLAWYQQKPGQAPRLLIYGSS |
| domain | | NRATGIPDRFSGSGSGTDFTLTIRRLEPEDFAVYYCQQYHSSPSWTFG |
| | | QGTKVEIK |
| BCMA_EBB- | 1124 | GAGGTGCAGCTTGTGGAAACCGGTGGCGGACTGGTGCAGCCCGGAGGA |
| C1978-C7- | | AGCCTCAGGCTGTCCTGCGCCGCGTCCGGCTTCACCTTCTCCTCGTAC |
| nt | | GCCATGTCCTGGGTCCGCCAGGCCCCCGGAAAGGGCCTGGAATGGGTG |
| ScFv | | TCCGCCATCTCTGGAAGCGGAGGTTCCACGTACTACGCGGACAGCGTC |
| domain | | AAGGGAAGGTTCACAATCTCCCGCGATAATTCGAAGAACACTCTGTAC |
| | | CTTCAAATGAACACCCTGAAGGCCGAGGACACTGCTGTGTACTACTGC |
| | | GCACGGGCCACCTACAAGAGAGAGCTCCGGTACTACTACGGAATGGAC |
| | | GTCTGGGGCCAGGGAACTACTGTGACCGTGTCCTCGGGAGGGGGTGGC |
| | | TCCGGGGGGGGCGGCTCCGGCGGAGGCGGTTCCGAGATTGTGCTGACC |
| | | CAGTCACCTTCAACTCTGTCGCTGTCCCCGGGAGAGAGCGCTACTCTG |
| | | AGCTGCCGGGCCAGCCAGTCCGTGTCCACCACCTTCCTCGCCTGGTAT |
| | | CAGCAGAAGCCGGGGCAGGCACCACGGCTCTTGATCTACGGGTCAAGC |
| | | AACAGAGCGACCGGAATTCCTGACCGCTTCTCGGGGAGCGGTTCAGGC |
| | | ACCGACTTCACCCTGACTATCCGGCGCCTGGAACCCGAAGATTTCGCC |
| | | GTGTATTACTGTCAACAGTACCACTCCTCGCCGTCCTGGACCTTTGGC |
| | | CAAGGAACCAAAGTGGAAATCAAG |
| BCMA_EBB- | 1125 | EVQLVETGGGLVQPGGSLRLSCAASGFTFSSYAMSWVRQAPGKGLEWV |
| C1978-C7- | | SAISGSGGSTYYADSVKGRFTISRDNSKNTLYLQMNTLKAEDTAVYYC |
| aa | | ARATYKRELRYYYGMDVWGQGTTVTVSS |
| VH | | |
| BCMA_EBB- | 1126 | EIVLTQSPSTLSLSPGESATLSCRASQSVSTTFLAWYQQKPGQAPRLL |
| C1978-C7- | | IYGSSNRATGIPDRFSGSGSGTDFTLTIRRLEPEDFAVYYCQQYHSSP |
| aa | | SWTFGQGTKVEIK |
| VL | | |
| BCMA_EBB- | 1127 | MALPVTALLLPLALLLHAARPEVQLVETGGGLVQPGGSLRLSCAASGF |
| C1978-C7- | | TFSSYAMSWVRQAPGKGLEWVSAISGSGGSTYYADSVKGRFTISRDNS |
| aa | | KNTLYLQMNTLKAEDTAVYYCARATYKRELRYYYGMDVWGQGTTVTVS |
| Full CART | | SGGGGSGGGGSGGGGSEIVLTQSPSTLSLSPGESATLSCRASQSVSTT |
| | | FLAWYQQKPGQAPRLLIYGSSNRATGIPDRFSGSGSGTDFTLTIRRLE |
| | | PEDFAVYYCQQYHSSPSWTFGQGTKVEIKTTTPAPRPPTPAPTIASQP |
| | | LSLRPEACRPAAGGAVHTRGLDFACDIYIWAPLAGTCGVLLLSLVITL |
| | | YCKRGRKKLLYIFKQPFMRPVQTTQEEDGCSCRFPEEEEGGCELRVKF |
| | | SRSADAPAYKQGQNQLYNELNLGRREEYDVLDKRRGRDPEMGGKPRRK |
| | | NPQEGLYNELQKDKMAEAYSEIGMKGERRRGKGHDGLYQGLSTATKDT |
| | | YDALHMQALPPR |
| BCMA_EBB- | 1128 | ATGGCCCTCCCTGTCACCGCCCTGCTGCTTCCGCTGGCTCTTCTGCTC |
| C1978-C7- | | CACGCCGCTCGGCCCGAGGTGCAGCTTGTGGAAACCGGTGGCGGACTG |
| nt | | GTGCAGCCCGGAGGAAGCCTCAGGCTGTCCTGCGCCGCGTCCGGCTTC |
| Full CART | | ACCTTCTCCTCGTACGCCATGTCCTGGGTCCGCCAGGCCCCCGGAAAG |
| | | GGCCTGGAATGGGTGTCCGCCATCTCTGGAAGCGGAGGTTCCACGTAC |
| | | TACGCGGACAGCGTCAAGGGAAGGTTCACAATCTCCCGCGATAATTCG |
| | | AAGAACACTCTGTACCTTCAAATGAACACCCTGAAGGCCGAGGACACT |
| | | GCTGTGTACTACTGCGCACGGGCCACCTACAAGAGAGAGCTCCGGTAC |
| | | TACTACGGAATGGACGTCTGGGGCCAGGGAACTACTGTGACCGTGTCC |
| | | TCGGGAGGGGGTGGCTCCGGGGGGGGCGGCTCCGGCGGAGGCGGTTCC |
| | | GAGATTGTGCTGACCCAGTCACCTTCAACTCTGTCGCTGTCCCCGGGA |
| | | GAGAGCGCTACTCTGAGCTGCCGGGCCAGCCAGTCCGTGTCCACCACC |
| | | TTCCTCGCCTGGTATCAGCAGAAGCCGGGGCAGGCACCACGGCTCTTG |
| | | ATCTACGGGTCAAGCAACAGAGCGACCGGAATTCCTGACCGCTTCTCG |
| | | GGGAGCGGTTCAGGCACCGACTTCACCCTGACTATCCGGCGCCTGGAA |
| | | CCCGAAGATTTCGCCGTGTATTACTGTCAACAGTACCACTCCTCGCCG |
| | | TCCTGGACCTTTGGCCAAGGAACCAAAGTGGAAATCAAGACCACTACC |
| | | CCAGCACCGAGGCCACCCACCCCGGCTCCTACCATCGCCTCCCAGCCT |
| | | CTGTCCCTGCGTCCGGAGGCATGTAGACCCGCAGCTGGTGGGGCCGTG |
| | | CATACCCGGGGTCTTGACTTCGCCTGCGATATCTACATTTGGGCCCCT |
| | | CTGGCTGGTACTTGCGGGGTCCTGCTGCTTTCACTCGTGATCACTCTT |
| | | TACTGTAAGCGCGGTCGGAAGAAGCTGCTGTACATCTTTAAGCAACCC |
| | | TTCATGAGGCCTGTGCAGACTACTCAAGAGGAGGACGGCTGTTCATGC |
| | | CGGTTCCCAGAGGAGGAGGAAGGCGGCTGCGAACTGCGCGTGAAATTC |
| | | AGCCGCAGCGCAGATGCTCCAGCCTACAAGCAGGGGCAGAACCAGCTC |
| | | TACAACGAACTCAATCTTGGTCGGAGAGAGGAGTACGACGTGCTGGAC |
| | | AAGCGGAGAGGACGGGACCCAGAAATGGGCGGGAAGCCGCGCAGAAAG |
| | | AATCCCCAAGAGGGCCTGTACAACGAGCTCCAAAAGGATAAGATGGCA |
| | | GAAGCCTATAGCGAGATTGGTATGAAAGGGGAACGCAGAAGAGGCAAA |
| | | GGCCACGACGGACTGTACCAGGGACTCAGCACCGCCACCAAGGACACC |
| | | TATGACGCTCTTCACATGCAGGCCCTGCCGCCTCGG |

BCMA_EBB-C1978-D10

| | | |
|---|---|---|
| BCMA_EBB- | 1129 | EVQLVETGGGLVQPGRSLRLSCAASGFTFDDYAMHWVRQAPGKGLEWV |
| C1978- | | SGISWNSGSIGYADSVKGRFTISRDNAKNSLYLQMNSLRDEDTAVYYC |
| D10-aa | | ARVGKAVPDVWGQGTTVTVSSGGGGSGGGGSGGGGSDIVMTQTPSSLS |
| ScFv | | ASVGDRVTITCRASQSISSYLNWYQQKPGKAPKLLIYAASSLQSGVPS |
| domain | | RFSGSGSGTDFTLTISSLQPEDFATYYCQQSYSTPYSFGQGTRLEIK |
| BCMA_EBB- | 1130 | GAAGTGCAGCTCGTGGAAACTGGAGGTGGACTCGTGCAGCCTGGACGG |
| C1978- | | TCGCTGCGGCTGAGCTGCGCTGCATCCGGCTTCACCTTCGACGATTAT |
| D10-nt | | GCCATGCACTGGGTCAGACAGGCGCCAGGGAAGGGACTTGAGTGGGTG |
| ScFv | | TCCGGTATCAGCTGGAATAGCGGCTCAATCGGATACGCGGACTCCGTG |
| domain | | AAGGGAAGGTTCACCATTTCCCGCGACAACGCCAAGAACTCCCTGTAC |
| | | TTGCAAATGAACAGCCTCCGGGATGAGGACACTGCCGTGTACTACTGC |
| | | GCCCGCGTCGGAAAAGCTGTGCCCGACGTCTGGGGCCAGGGAACCACT |
| | | GTGACCGTGTCCAGCGGCGGGGGTGGATCGGGCGGTGGAGGGTCCGGT |
| | | GGAGGGGGCTCAGATATTGTGATGACCCAGACCCCCTCGTCCCTGTCC |
| | | GCCTCGGTCGGCGACCGCGTGACTATCACATGTAGAGCCTCGCAGAGC |
| | | ATCTCCAGCTACCTGAACTGGTATCAGCAGAAGCCGGGGAAGGCCCCG |
| | | AAGCTCCTGATCTACGCGGCATCATCACTGCAATCGGGAGTGCCGAGC |
| | | CGGTTTTCCGGGTCCGGCTCCGGCACCGACTTCACGCTGACCATTTCT |
| | | TCCCTGCAACCCGAGGACTTCGCCACTTACTACTGCCAGCAGTCCTAC |
| | | TCCACCCCTTACTCCTTCGGCCAAGGAACCAGGCTGGAAATCAAG |
| BCMA_EBB- | 1131 | EVQLVETGGGLVQPGRSLRLSCAASGFTFDDYAMHWVRQAPGKGLEWV |
| C1978- | | SGISWNSGSIGYADSVKGRFTISRDNAKNSLYLQMNSLRDEDTAVYYC |
| D10-aa | | ARVGKAVPDVWGQGTTVTVSS |
| VH | | |
| BCMA_EBB- | 1132 | DIVMTQTPSSLSASVGDRVTITCRASQSISSYLNWYQQKPGKAPKLLI |
| C1978- | | YAASSLQSGVPSRFSGSGSGTDFTLTISSLQPEDFATYYCQQSYSTPY |
| D10-aa | | SFGQGTRLEIK |
| VL | | |
| BCMA_EBB- | 1133 | MALPVTALLLPLALLLHAARPEVQLVETGGGLVQPGRSLRLSCAASGF |
| C1978- | | TFDDYAMHWVRQAPGKGLEWVSGISWNSGSIGYADSVKGRFTISRDNA |
| D10-aa | | KNSLYLQMNSLRDEDTAVYYCARVGKAVPDVWGQGTTVTVSSGGGGSG |
| Full CART | | GGGSGGGGSDIVMTQTPSSLSASVGDRVTITCRASQSISSYLNWYQQK |
| | | PGKAPKLLIYAASSLQSGVPSRFSGSGSGTDFTLTISSLQPEDFATYY |
| | | CQQSYSTPYSFGQGTRLEIKTTTPAPRPPTPAPTIASQPLSLRPEACR |
| | | PAAGGAVHTRGLDFACDIYIWAPLAGTCGVLLLSLVITLYCKRGRKKL |
| | | LYIFKQPFMRPVQTTQEEDGCSCRFPEEEEGGCELRVKFSRSADAPAY |
| | | KQGQNQLYNELNLGRREEYDVLDKRRGRDPEMGGKPRRKNPQEGLYNE |
| | | LQKDKMAEAYSEIGMKGERRRGKGHDGLYQGLSTATKDTYDALHMQAL |
| | | PPR |
| BCMA_EBB- | 1134 | ATGGCCCTCCCTGTCACCGCCCTGCTGCTTCCGCTGGCTCTTCTGCTC |
| C1978- | | CACGCCGCTCGGCCCGAAGTGCAGCTCGTGGAAACTGGAGGTGGACTC |
| D10-nt | | GTGCAGCCTGGACGGTCGCTGCGGCTGAGCTGCGCTGCATCCGGCTTC |
| Full CART | | ACCTTCGACGATTATGCCATGCACTGGGTCAGACAGGCGCCAGGGAAG |
| | | GGACTTGAGTGGGTGTCCGGTATCAGCTGGAATAGCGGCTCAATCGGA |
| | | TACGCGGACTCCGTGAAGGGAAGGTTCACCATTTCCCGCGACAACGCC |
| | | AAGAACTCCCTGTACTTGCAAATGAACAGCCTCCGGGATGAGGACACT |
| | | GCCGTGTACTACTGCGCCCGCGTCGGAAAAGCTGTGCCCGACGTCTGG |
| | | GGCCAGGGAACCACTGTGACCGTGTCCAGCGGCGGGGGTGGATCGGGC |
| | | GGTGGAGGGTCCGGTGGAGGGGGCTCAGATATTGTGATGACCCAGACC |
| | | CCCTCGTCCCTGTCCGCCTCGGTCGGCGACCGCGTGACTATCACATGT |
| | | AGAGCCTCGCAGAGCATCTCCAGCTACCTGAACTGGTATCAGCAGAAG |
| | | CCGGGGAAGGCCCCGAAGCTCCTGATCTACGCGGCATCATCACTGCAA |
| | | TCGGGAGTGCCGAGCCGGTTTTCCGGGTCCGGCTCCGGCACCGACTTC |
| | | ACGCTGACCATTTCTTCCCTGCAACCCGAGGACTTCGCCACTTACTAC |
| | | TGCCAGCAGTCCTACTCCACCCCTTACTCCTTCGGCCAAGGAACCAGG |
| | | CTGGAAATCAAGACCACTACCCCAGCACCGAGGCCACCCACCCCGGCT |
| | | CCTACCATCGCCTCCCAGCCTCTGTCCCTGCGTCCGGAGGCATGTAGA |
| | | CCCGCAGCTGGTGGGGCCGTGCATACCCGGGGTCTTGACTTCGCCTGC |
| | | GATATCTACATTTGGGCCCCTCTGGCTGGTACTTGCGGGGTCCTGCTG |
| | | CTTTCACTCGTGATCACTCTTTACTGTAAGCGCGGTCGGAAGAAGCTG |
| | | CTGTACATCTTTAAGCAACCCTTCATGAGGCCTGTGCAGACTACTCAA |
| | | GAGGAGGACGGCTGTTCATGCCGGTTCCCAGAGGAGGAGGAAGGCGGC |
| | | TGCGAACTGCGCGTGAAATTCAGCCGCAGCGCAGATGCTCCAGCCTAC |
| | | AAGCAGGGGCAGAACCAGCTCTACAACGAACTCAATCTTGGTCGGAGA |
| | | GAGGAGTACGACGTGCTGGACAAGCGGAGAGGACGGGACCCAGAAATG |
| | | GGCGGGAAGCCGCGCAGAAAGAATCCCCAAGAGGGCCTGTACAACGAG |
| | | CTCCAAAAGGATAAGATGGCAGAAGCCTATAGCGAGATTGGTATGAAA |
| | | GGGGAACGCAGAAGAGGCAAAGGCCACGACGGACTGTACCAGGGACTC |
| | | AGCACCGCCACCAAGGACACCTATGACGCTCTTCACATGCAGGCCCTG |
| | | CCGCCTCGG |

BCMA_EBB-C1979-C12

| | | |
|---|---|---|
| BCMA_EBB- | 1135 | EVQLVESGGGLVQPGRSLRLSCTASGFTFDDYAMHWVRQRPGKGLEWV |
| C1979- | | ASINWKGNSLAYGDSVKGRFAISRDNAKNTVFLQMNSLRTEDTAVYYC |
| C12-aa | | ASHQGVAYYNYAMDVWGRGTLVTVSSGGGGSGGGGSGGGGSEIVLTQS |
| ScFv | | PGTLSLSPGERATLSCRATQSIGSSFLAWYQQRPGQAPRLLIYGASQR |
| domain | | ATGIPDRFSGRGSGTDFTLTISRVEPEDSAVYYCQHYESSPSWTFGQG |
| | | TKVEIK |
| BCMA_EBB- | 1136 | GAAGTGCAGCTCGTGGAGAGCGGGGGAGGATTGGTGCAGCCCGGAAGG |
| C1979- | | TCCCTGCGGCTCTCCTGCACTGCGTCTGGCTTCACCTTCGACGACTAC |
| C12-nt | | GCGATGCACTGGGTCAGACAGCGCCCGGGAAAGGGCCTGGAATGGGTC |
| ScFv | | GCCTCAATCAACTGGAAGGGAAACTCCCTGGCCTATGGCGACAGCGTG |
| domain | | AAGGGCCGCTTCGCCATTTCGCGCGACAACGCCAAGAACACCGTGTTT |
| | | CTGCAAATGAATTCCCTGCGGACCGAGGATACCGCTGTGTACTACTGC |
| | | GCCAGCCACCAGGGCGTGGCATACTATAACTACGCCATGGACGTGTGG |
| | | GGAAGAGGGACGCTCGTCACCGTGTCCTCCGGGGGCGGTGGATCGGGT |
| | | GGAGGAGGAAGCGGTGGCGGGGGCAGCGAAATCGTGCTGACTCAGAGC |
| | | CCGGGAACTCTTTCACTGTCCCCGGGAGAACGGGCCACTCTCTCGTGC |
| | | CGGGCCACCCAGTCCATCGGCTCCTCCTTCCTTGCCTGGTACCAGCAG |
| | | AGGCCAGGACAGGCGCCCCGCCTGCTGATCTACGGTGCTTCCCAACGC |
| | | GCCACTGGCATTCCTGACCGGTTCAGCGGCAGAGGGTCGGGAACCGAT |
| | | TTCACACTGACCATTTCCCGGGTGGAGCCCGAAGATTCGGCAGTCTAC |
| | | TACTGTCAGCATTACGAGTCCTCCCCTTCATGGACCTTCGGTCAAGGG |
| | | ACCAAAGTGGAGATCAAG |
| BCMA_EBB- | 1137 | EVQLVESGGGLVQPGRSLRLSCTASGFTFDDYAMHWVRQRPGKGLEWV |
| C1979- | | ASINWKGNSLAYGDSVKGRFAISRDNAKNTVFLQMNSLRTEDTAVYYC |
| C12-aa | | ASHQGVAYYNYAMDVWGRGTLVTVSS |
| VH | | |
| BCMA_EBB- | 1138 | EIVLTQSPGTLSLSPGERATLSCRATQSIGSSFLAWYQQRPGQAPRLL |
| C1979- | | IYGASQRATGIPDRFSGRGSGTDFTLTISRVEPEDSAVYYCQHYESSP |
| C12-aa | | SWTFGQGTKVEIK |
| VL | | |
| BCMA_EBB- | 1139 | MALPVTALLLPLALLLHAARPEVQLVESGGGLVQPGRSLRLSCTASGF |
| C1979- | | TFDDYAMHWVRQRPGKGLEWVASINWKGNSLAYGDSVKGRFAISRDNA |
| C12-aa | | KNTVFLQMNSLRTEDTAVYYCASHQGVAYYNYAMDVWGRGTLVTVSSG |
| Full CART | | GGGSGGGGSGGGGSEIVLTQSPGTLSLSPGERATLSCRATQSIGSSFL |
| | | AWYQQRPGQAPRLLIYGASQRATGIPDRFSGRGSGTDFTLTISRVEPE |
| | | DSAVYYCQHYESSPSWTFGQGTKVEIKTTTPAPRPPTPAPTIASQPLS |
| | | LRPEACRPAAGGAVHTRGLDFACDIYIWAPLAGTCGVLLLSLVITLYC |
| | | KRGRKKLLYIFKQPFMRPVQTTQEEDGCSCRFPEEEEGGCELRVKFSR |
| | | SADAPAYKQGQNQLYNELNLGRREEYDVLDKRRGRDPEMGGKPRRKNP |
| | | QEGLYNELQKDKMAEAYSEIGMKGERRRGKGHDGLYQGLSTATKDTYD |
| | | ALHMQALPPR |
| BCMA_EBB- | 1140 | ATGGCCCTCCCTGTCACCGCCCTGCTGCTTCCGCTGGCTCTTCTGCTC |
| C1979- | | CACGCCGCTCGGCCCGAAGTGCAGCTCGTGGAGAGCGGGGGAGGATTG |
| C12-nt | | GTGCAGCCCGGAAGGTCCCTGCGGCTCTCCTGCACTGCGTCTGGCTTC |
| Full CART | | ACCTTCGACGACTACGCGATGCACTGGGTCAGACAGCGCCCGGGAAAG |
| | | GGCCTGGAATGGGTCGCCTCAATCAACTGGAAGGGAAACTCCCTGGCC |
| | | TATGGCGACAGCGTGAAGGGCCGCTTCGCCATTTCGCGCGACAACGCC |
| | | AAGAACACCGTGTTTCTGCAAATGAATTCCCTGCGGACCGAGGATACC |
| | | GCTGTGTACTACTGCGCCAGCCACCAGGGCGTGGCATACTATAACTAC |
| | | GCCATGGACGTGTGGGGAAGAGGGACGCTCGTCACCGTGTCCTCCGGG |
| | | GGCGGTGGATCGGGTGGAGGAGGAAGCGGTGGCGGGGGCAGCGAAATC |
| | | GTGCTGACTCAGAGCCCGGGAACTCTTTCACTGTCCCCGGGAGAACGG |
| | | GCCACTCTCTCGTGCCGGGCCACCCAGTCCATCGGCTCCTCCTTCCTT |
| | | GCCTGGTACCAGCAGAGGCCAGGACAGGCGCCCCGCCTGCTGATCTAC |
| | | GGTGCTTCCCAACGCGCCACTGGCATTCCTGACCGGTTCAGCGGCAGA |
| | | GGGTCGGGAACCGATTTCACACTGACCATTTCCCGGGTGGAGCCCGAA |
| | | GATTCGGCAGTCTACTACTGTCAGCATTACGAGTCCTCCCCTTCATGG |
| | | ACCTTCGGTCAAGGGACCAAAGTGGAGATCAAGACCACTACCCCAGCA |
| | | CCGAGGCCACCCACCCCGGCTCCTACCATCGCCTCCCAGCCTCTGTCC |
| | | CTGCGTCCGGAGGCATGTAGACCCGCAGCTGGTGGGGCCGTGCATACC |
| | | CGGGGTCTTGACTTCGCCTGCGATATCTACATTTGGGCCCCTCTGGCT |
| | | GGTACTTGCGGGGTCCTGCTGCTTTCACTCGTGATCACTCTTTACTGT |
| | | AAGCGCGGTCGGAAGAAGCTGCTGTACATCTTTAAGCAACCCTTCATG |
| | | AGGCCTGTGCAGACTACTCAAGAGGAGGACGGCTGTTCATGCCGGTTC |
| | | CCAGAGGAGGAGGAAGGCGGCTGCGAACTGCGCGTGAAATTCAGCCGC |
| | | AGCGCAGATGCTCCAGCCTACAAGCAGGGGCAGAACCAGCTCTACAAC |
| | | GAACTCAATCTTGGTCGGAGAGAGGAGTACGACGTGCTGGACAAGCGG |
| | | AGAGGACGGGACCCAGAAATGGGCGGGAAGCCGCGCAGAAAGAATCCC |
| | | CAAGAGGGCCTGTACAACGAGCTCCAAAAGGATAAGATGGCAGAAGCC |
| | | TATAGCGAGATTGGTATGAAAGGGGAACGCAGAAGAGGCAAAGGCCAC |
| | | GACGGACTGTACCAGGGACTCAGCACCGCCACCAAGGACACCTATGAC |
| | | GCTCTTCACATGCAGGCCCTGCCGCCTCGG |

BCMA_EBB-C1980-G4

| | | |
|---|---|---|
| BCMA_EBB- | 1141 | EVQLVESGGGLVQPGGSLRLSCAASGFTFSSYAMSWVRQAPGKGLEWV |
| C1980- | | SAISGSGGSTYYADSVKGRFTISRDNSKNTLYLQMNSLRAEDTAVYYC |
| G4-aa | | AKVVRDGMDVWGQGTTVTVSSGGGGSGGGGSGGGGSEIVLTQSPATLS |
| ScFv | | LSPGERATLSCRASQSVSSSYLAWYQQKPGQAPRLLIYGASSRATGIP |
| domain | | DRFSGNGSGTDFTLTISRLEPEDFAVYYCQQYGSPPRFTFGPGTKVDI |
| | | K |
| BCMA_EBB- | 1142 | GAGGTGCAGTTGGTCGAAAGCGGGGGCGGGCTTGTGCAGCCTGGCGGA |
| C1980- | | TCACTGCGGCTGTCCTGCGCGGCATCAGGCTTCACGTTTTCTTCCTAC |
| G4-nt | | GCCATGTCCTGGGTGCGCCAGGCCCCTGGAAAGGGACTGGAATGGGTG |
| ScFv | | TCCGCGATTTCGGGGTCCGGCGGGAGCACCTACTACGCCGATTCCGTG |
| domain | | AAGGGCCGCTTCACTATCTCGCGGGACAACTCCAAGAACACCCTCTAC |
| | | CTCCAAATGAATAGCCTGCGGGCCGAGGATACCGCCGTCTACTATTGC |
| | | GCTAAGGTCGTGCGCGACGGAATGGACGTGTGGGGACAGGGTACCACC |
| | | GTGACAGTGTCCTCGGGGGGAGGCGGTAGCGGCGGAGGAGGAAGCGGT |
| | | GGTGGAGGTTCCGAGATTGTGCTGACTCAATCACCCGCGACCCTGAGC |
| | | CTGTCCCCCGGCGAAAGGGCCACTCTGTCCTGTCGGGCCAGCCAATCA |
| | | GTCTCCTCCTCGTACCTGGCCTGGTACCAGCAGAAGCCAGGACAGGCT |
| | | CCGAGACTCCTTATCTATGGCGCATCCTCCCGCGCCACCGGAATCCCG |
| | | GATAGGTTCTCGGGAAACGGATCGGGGACCGACTTCACTCTCACCATC |
| | | TCCCGGCTGGAACCGGAGGACTTCGCCGTGTACTACTGCCAGCAGTAC |
| | | GGCAGCCCGCCTAGATTCACTTTCGGCCCCGGCACCAAAGTGGACATC |
| | | AAG |
| BCMA_EBB- | 1143 | EVQLVESGGGLVQPGGSLRLSCAASGFTFSSYAMSWVRQAPGKGLEWV |
| C1980- | | SAISGSGGSTYYADSVKGRFTISRDNSKNTLYLQMNSLRAEDTAVYYC |
| G4-aa | | AKVVRDGMDVWGQGTTVTVSS |
| VH | | |
| BCMA_EBB- | 1144 | EIVLTQSPATLSLSPGERATLSCRASQSVSSSYLAWYQQKPGQAPRLL |
| C1980- | | IYGASSRATGIPDRFSGNGSGTDFTLTISRLEPEDFAVYYCQQYGSPP |
| G4-aa | | RFTFGPGTKVDIK |
| VL | | |
| BCMA_EBB- | 1145 | MALPVTALLLPLALLLHAARPEVQLVESGGGLVQPGGSLRLSCAASGF |
| C1980- | | TFSSYAMSWVRQAPGKGLEWVSAISGSGGSTYYADSVKGRFTISRDNS |
| G4-aa | | KNTLYLQMNSLRAEDTAVYYCAKVVRDGMDVWGQGTTVTVSSGGGGSG |
| Full CART | | GGGSGGGGSEIVLTQSPATLSLSPGERATLSCRASQSVSSSYLAWYQQ |
| | | KPGQAPRLLIYGASSRATGIPDRFSGNGSGTDFTLTISRLEPEDFAVY |
| | | YCQQYGSPPRFTFGPGTKVDIKTTTPAPRPPTPAPTIASQPLSLRPEA |
| | | CRPAAGGAVHTRGLDFACDIYIWAPLAGTCGVLLLSLVITLYCKRGRK |
| | | KLLYIFKQPFMRPVQTTQEEDGCSCRFPEEEEGGCELRVKFSRSADAP |
| | | AYKQGQNQLYNELNLGRREEYDVLDKRRGRDPEMGGKPRRKNPQEGLY |
| | | NELQKDKMAEAYSEIGMKGERRRGKGHDGLYQGLSTATKDTYDALHMQ |
| | | ALPPR |
| BCMA_EBB- | 1146 | ATGGCCCTCCCTGTCACCGCCCTGCTGCTTCCGCTGGCTCTTCTGCTC |
| C1980- | | CACGCCGCTCGGCCCGAGGTGCAGTTGGTCGAAAGCGGGGGCGGGCTT |
| G4-nt | | GTGCAGCCTGGCGGATCACTGCGGCTGTCCTGCGCGGCATCAGGCTTC |
| Full CART | | ACGTTTTCTTCCTACGCCATGTCCTGGGTGCGCCAGGCCCCTGGAAAG |
| | | GGACTGGAATGGGTGTCCGCGATTTCGGGGTCCGGCGGGAGCACCTAC |
| | | TACGCCGATTCCGTGAAGGGCCGCTTCACTATCTCGCGGGACAACTCC |
| | | AAGAACACCCTCTACCTCCAAATGAATAGCCTGCGGGCCGAGGATACC |
| | | GCCGTCTACTATTGCGCTAAGGTCGTGCGCGACGGAATGGACGTGTGG |
| | | GGACAGGGTACCACCGTGACAGTGTCCTCGGGGGGAGGCGGTAGCGGC |
| | | GGAGGAGGAAGCGGTGGTGGAGGTTCCGAGATTGTGCTGACTCAATCA |
| | | CCCGCGACCCTGAGCCTGTCCCCCGGCGAAAGGGCCACTCTGTCCTGT |
| | | CGGGCCAGCCAATCAGTCTCCTCCTCGTACCTGGCCTGGTACCAGCAG |
| | | AAGCCAGGACAGGCTCCGAGACTCCTTATCTATGGCGCATCCTCCCGC |
| | | GCCACCGGAATCCCGGATAGGTTCTCGGGAAACGGATCGGGGACCGAC |
| | | TTCACTCTCACCATCTCCCGGCTGGAACCGGAGGACTTCGCCGTGTAC |
| | | TACTGCCAGCAGTACGGCAGCCCGCCTAGATTCACTTTCGGCCCCGGC |
| | | ACCAAAGTGGACATCAAGACCACTACCCCAGCACCGAGGCCACCCACC |
| | | CCGGCTCCTACCATCGCCTCCCAGCCTCTGTCCCTGCGTCCGGAGGCA |
| | | TGTAGACCCGCAGCTGGTGGGGCCGTGCATACCCGGGGTCTTGACTTC |
| | | GCCTGCGATATCTACATTTGGGCCCCTCTGGCTGGTACTTGCGGGGTC |
| | | CTGCTGCTTTCACTCGTGATCACTCTTTACTGTAAGCGCGGTCGGAAG |
| | | AAGCTGCTGTACATCTTTAAGCAACCCTTCATGAGGCCTGTGCAGACT |
| | | ACTCAAGAGGAGGACGGCTGTTCATGCCGGTTCCCAGAGGAGGAGGAA |
| | | GGCGGCTGCGAACTGCGCGTGAAATTCAGCCGCAGCGCAGATGCTCCA |
| | | GCCTACAAGCAGGGGCAGAACCAGCTCTACAACGAACTCAATCTTGGT |
| | | CGGAGAGAGGAGTACGACGTGCTGGACAAGCGGAGAGGACGGGACCCA |
| | | GAAATGGGCGGGAAGCCGCGCAGAAAGAATCCCCAAGAGGGCCTGTAC |
| | | AACGAGCTCCAAAAGGATAAGATGGCAGAAGCCTATAGCGAGATTGGT |
| | | ATGAAAGGGGAACGCAGAAGAGGCAAAGGCCACGACGGACTGTACCAG |
| | | GGACTCAGCACCGCCACCAAGGACACCTATGACGCTCTTCACATGCAG |
| | | GCCCTGCCGCCTCGG |

BCMA_EBB-C1980-D2

| | | |
|---|---|---|
| BCMA_EBB- | 1147 | EVQLLESGGGLVQPGGSLRLSCAASGFTFSSYAMSWVRQAPGKGLEWV |
| C1980- | | SAISGSGGSTYYADSVKGRFTISRDNSKNTLYLQMNSLRAEDTAVYYC |
| D2-aa | | AKIPQTGTFDYWGQGTLVTVSSGGGGSGGGGSGGGGSEIVLTQSPGTL |
| ScFv | | SLSPGERATLSCRASQSVSSSYLAWYQQRPGQAPRLLIYGASSRATGI |
| domain | | PDRFSGSGSGTDFTLTISRLEPEDFAVYYCQHYGSSPSWTFGQGTRLE |
| | | IK |
| BCMA_EBB- | 1148 | GAAGTGCAGCTGCTGGAGTCCGGCGGTGGATTGGTGCAACCGGGGGGA |
| C1980- | | TCGCTCAGACTGTCCTGTGCGGCGTCAGGCTTCACCTTCTCGAGCTAC |
| D2-nt | | GCCATGTCATGGGTCAGACAGGCCCCTGGAAAGGGTCTGGAATGGGTG |
| ScFv | | TCCGCCATTTCCGGGAGCGGGGGATCTACATACTACGCCGATAGCGTG |
| domain | | AAGGGCCGCTTCACCATTTCCCGGGACAACTCCAAGAACACTCTCTAT |
| | | CTGCAAATGAACTCCCTCCGCGCTGAGGACACTGCCGTGTACTACTGC |
| | | GCCAAAATCCCTCAGACCGGCACCTTCGACTACTGGGGACAGGGGACT |
| | | CTGGTCACCGTCAGCAGCGGTGGCGGAGGTTCGGGGGGAGGAGGAAGC |
| | | GGCGGCGGAGGGTCCGAGATTGTGCTGACCCAGTCACCCGGCACTTTG |
| | | TCCCTGTCGCCTGGAGAAAGGGCCACCCTTTCCTGCCGGGCATCCCAA |
| | | TCCGTGTCCTCCTCGTACCTGGCCTGGTACCAGCAGAGGCCCGGACAG |
| | | GCCCCACGGCTTCTGATCTACGGAGCAAGCAGCCGCGCGACCGGTATC |
| | | CCGGACCGGTTTTCGGGCTCGGGCTCAGGAACTGACTTCACCCTCACC |
| | | ATCTCCCGCCTGGAACCCGAAGATTTCGCTGTGTATTACTGCCAGCAC |
| | | TACGGCAGCTCCCCGTCCTGGACGTTCGGCCAGGGAACTCGGCTGGAG |
| | | ATCAAG |
| BCMA_EBB- | 1149 | EVQLLESGGGLVQPGGSLRLSCAASGFTFSSYAMSWVRQAPGKGLEWV |
| C1980- | | SAISGSGGSTYYADSVKGRFTISRDNSKNTLYLQMNSLRAEDTAVYYC |
| D2-aa | | AKIPQTGTFDYWGQGTLVTVSS |
| VH | | |
| BCMA_EBB- | 1150 | EIVLTQSPGTLSLSPGERATLSCRASQSVSSSYLAWYQQRPGQAPRLL |
| C1980- | | IYGASSRATGIPDRFSGSGSGTDFTLTISRLEPEDFAVYYCQHYGSSP |
| D2-aa | | SWTFGQGTRLEIK |
| VL | | |
| BCMA_EBB- | 1151 | MALPVTALLLPLALLLHAARPEVQLLESGGGLVQPGGSLRLSCAASGF |
| C1980- | | TFSSYAMSWVRQAPGKGLEWVSAISGSGGSTYYADSVKGRFTISRDNS |
| D2-aa | | KNTLYLQMNSLRAEDTAVYYCAKIPQTGTFDYWGQGTLVTVSSGGGGS |
| Full CART | | GGGGSGGGGSEIVLTQSPGTLSLSPGERATLSCRASQSVSSSYLAWYQ |
| | | QRPGQAPRLLIYGASSRATGIPDRFSGSGSGTDFTLTISRLEPEDFAV |
| | | YYCQHYGSSPSWTFGQGTRLEIKTTTPAPRPPTPAPTIASQPLSLRPE |
| | | ACRPAAGGAVHTRGLDFACDIYIWAPLAGTCGVLLLSLVITLYCKRGR |
| | | KKLLYIFKQPFMRPVQTTQEEDGCSCRFPEEEEGGCELRVKFSRSADA |
| | | PAYKQGQNQLYNELNLGRREEYDVLDKRRGRDPEMGGKPRRKNPQEGL |
| | | YNELQKDKMAEAYSEIGMKGERRRGKGHDGLYQGLSTATKDTYDALHM |
| | | QALPPR |
| BCMA_EBB- | 1152 | ATGGCCCTCCCTGTCACCGCCCTGCTGCTTCCGCTGGCTCTTCTGCTC |
| C1980- | | CACGCCGCTCGGCCCGAAGTGCAGCTGCTGGAGTCCGGCGGTGGATTG |
| D2-nt | | GTGCAACCGGGGGGATCGCTCAGACTGTCCTGTGCGGCGTCAGGCTTC |
| Full CART | | ACCTTCTCGAGCTACGCCATGTCATGGGTCAGACAGGCCCCTGGAAAG |
| | | GGTCTGGAATGGGTGTCCGCCATTTCCGGGAGCGGGGGATCTACATAC |
| | | TACGCCGATAGCGTGAAGGGCCGCTTCACCATTTCCCGGGACAACTCC |
| | | AAGAACACTCTCTATCTGCAAATGAACTCCCTCCGCGCTGAGGACACT |
| | | GCCGTGTACTACTGCGCCAAAATCCCTCAGACCGGCACCTTCGACTAC |
| | | TGGGGACAGGGGACTCTGGTCACCGTCAGCAGCGGTGGCGGAGGTTCG |
| | | GGGGGAGGAGGAAGCGGCGGCGGAGGGTCCGAGATTGTGCTGACCCAG |
| | | TCACCCGGCACTTTGTCCCTGTCGCCTGGAGAAAGGGCCACCCTTTCC |
| | | TGCCGGGCATCCCAATCCGTGTCCTCCTCGTACCTGGCCTGGTACCAG |
| | | CAGAGGCCCGGACAGGCCCCACGGCTTCTGATCTACGGAGCAAGCAGC |
| | | CGCGCGACCGGTATCCCGGACCGGTTTTCGGGCTCGGGCTCAGGAACT |
| | | GACTTCACCCTCACCATCTCCCGCCTGGAACCCGAAGATTTCGCTGTG |
| | | TATTACTGCCAGCACTACGGCAGCTCCCCGTCCTGGACGTTCGGCCAG |
| | | GGAACTCGGCTGGAGATCAAGACCACTACCCCAGCACCGAGGCCACCC |
| | | ACCCCGGCTCCTACCATCGCCTCCCAGCCTCTGTCCCTGCGTCCGGAG |
| | | GCATGTAGACCCGCAGCTGGTGGGGCCGTGCATACCCGGGGTCTTGAC |
| | | TTCGCCTGCGATATCTACATTTGGGCCCCTCTGGCTGGTACTTGCGGG |
| | | GTCCTGCTGCTTTCACTCGTGATCACTCTTTACTGTAAGCGCGGTCGG |
| | | AAGAAGCTGCTGTACATCTTTAAGCAACCCTTCATGAGGCCTGTGCAG |
| | | ACTACTCAAGAGGAGGACGGCTGTTCATGCCGGTTCCCAGAGGAGGAG |
| | | GAAGGCGGCTGCGAACTGCGCGTGAAATTCAGCCGCAGCGCAGATGCT |
| | | CCAGCCTACAAGCAGGGGCAGAACCAGCTCTACAACGAACTCAATCTT |
| | | GGTCGGAGAGAGGAGTACGACGTGCTGGACAAGCGGAGAGGACGGGAC |
| | | CCAGAAATGGGCGGGAAGCCGCGCAGAAAGAATCCCCAAGAGGGCCTG |
| | | TACAACGAGCTCCAAAAGGATAAGATGGCAGAAGCCTATAGCGAGATT |
| | | GGTATGAAAGGGGAACGCAGAAGAGGCAAAGGCCACGACGGACTGTAC |
| | | CAGGGACTCAGCACCGCCACCAAGGACACCTATGACGCTCTTCACATG |
| | | CAGGCCCTGCCGCCTCGG |

BCMA_EBB-C1978-A10

| | | |
|---|---|---|
| BCMA_EBB- | 1153 | EVQLVETGGGLVQPGGSLRLSCAASGFTFSSYAMSWVRQAPGKGLEWV |
| C1978- | | SAISGSGGSTYYADSVKGRFTMSRENDKNSVFLQMNSLRVEDTGVYYC |
| A10-aa | | ARANYKRELRYYYGMDVWGQGTMVTVSSGGGGSGGGGSGGGGSEIVMT |
| ScFv | | QSPGTLSLSPGESATLSCRASQRVASNYLAWYQHKPGQAPSLLISGAS |
| domain | | SRATGVPDRFSGSGSGTDFTLAISRLEPEDSAVYYCQHYDSSPSWTFG |
| | | QGTKVEIK |
| BCMA_EBB- | 1154 | GAAGTGCAACTGGTGGAAACCGGTGGAGGACTCGTGCAGCCTGGCGGC |
| C1978- | | AGCCTCCGGCTGAGCTGCGCCGCTTCGGGATTCACCTTTTCCTCCTAC |
| A10-nt | | GCGATGTCTTGGGTCAGACAGGCCCCCGGAAAGGGGCTGGAATGGGTG |
| ScFv | | TCAGCCATCTCCGGCTCCGGCGGATCAACGTACTACGCCGACTCCGTG |
| domain | | AAAGGCCGGTTCACCATGTCGCGCGAGAATGACAAGAACTCCGTGTTC |
| | | CTGCAAATGAACTCCCTGAGGGTGGAGGACACCGGAGTGTACTATTGT |
| | | GCGCGCGCCAACTACAAGAGAGAGCTGCGGTACTACTACGGAATGGAC |
| | | GTCTGGGGACAGGGAACTATGGTGACCGTGTCATCCGGTGGAGGGGGA |
| | | AGCGGCGGTGGAGGCAGCGGGGGCGGGGGTTCAGAAATTGTCATGACC |
| | | CAGTCCCCGGGAACTCTTTCCCTCTCCCCCGGGGAATCCGCGACTTTG |
| | | TCCTGCCGGGCCAGCCAGCGCGTGGCCTCGAACTACCTCGCATGGTAC |
| | | CAGCATAAGCCAGGCCAAGCCCCTTCCCTGCTGATTTCCGGGGCTAGC |
| | | AGCCGCGCCACTGGCGTGCCGGATAGGTTCTCGGGAAGCGGCTCGGGT |
| | | ACCGATTTCACCCTGGCAATCTCGCGGCTGGAACCGGAGGATTCGGCC |
| | | GTGTACTACTGCCAGCACTATGACTCATCCCCCTCCTGGACATTCGGA |
| | | CAGGGCACCAAGGTCGAGATCAAG |
| BCMA_EBB- | 1155 | EVQLVETGGGLVQPGGSLRLSCAASGFTFSSYAMSWVRQAPGKGLEWV |
| C1978- | | SAISGSGGSTYYADSVKGRFTMSRENDKNSVFLQMNSLRVEDTGVYYC |
| A10-aa | | ARANYKRELRYYYGMDVWGQGTMVTVSS |
| VH | | |
| BCMA_EBB- | 1156 | EIVMTQSPGTLSLSPGESATLSCRASQRVASNYLAWYQHKPGQAPSLL |
| C1978- | | ISGASSRATGVPDRFSGSGSGTDFTLAISRLEPEDSAVYYCQHYDSSP |
| A10-aa | | SWTFGQGTKVEIK |
| VL | | |
| BCMA_EBB- | 1157 | MALPVTALLLPLALLLHAARPEVQLVETGGGLVQPGGSLRLSCAASGF |
| C1978- | | TFSSYAMSWVRQAPGKGLEWVSAISGSGGSTYYADSVKGRFTMSREND |
| A10-aa | | KNSVFLQMNSLRVEDTGVYYCARANYKRELRYYYGMDVWGQGTMVTVS |
| Full CART | | SGGGGSGGGGSGGGGSEIVMTQSPGTLSLSPGESATLSCRASQRVASN |
| | | YLAWYQHKPGQAPSLLISGASSRATGVPDRFSGSGSGTDFTLAISRLE |
| | | PEDSAVYYCQHYDSSPSWTFGQGTKVEIKTTTPAPRPPTPAPTIASQP |
| | | LSLRPEACRPAAGGAVHTRGLDFACDIYIWAPLAGTCGVLLLSLVITL |
| | | YCKRGRKKLLYIFKQPFMRPVQTTQEEDGCSCRFPEEEEGGCELRVKF |
| | | SRSADAPAYKQGQNQLYNELNLGRREEYDVLDKRRGRDPEMGGKPRRK |
| | | NPQEGLYNELQKDKMAEAYSEIGMKGERRRGKGHDGLYQGLSTATKDT |
| | | YDALHMQALPPR |
| BCMA_EBB- | 1158 | ATGGCCCTCCCTGTCACCGCCCTGCTGCTTCCGCTGGCTCTTCTGCTC |
| C1978- | | CACGCCGCTCGGCCCGAAGTGCAACTGGTGGAAACCGGTGGAGGACTC |
| A10-nt | | GTGCAGCCTGGCGGCAGCCTCCGGCTGAGCTGCGCCGCTTCGGGATTC |
| Full CART | | ACCTTTTCCTCCTACGCGATGTCTTGGGTCAGACAGGCCCCCGGAAAG |
| | | GGGCTGGAATGGGTGTCAGCCATCTCCGGCTCCGGCGGATCAACGTAC |
| | | TACGCCGACTCCGTGAAAGGCCGGTTCACCATGTCGCGCGAGAATGAC |
| | | AAGAACTCCGTGTTCCTGCAAATGAACTCCCTGAGGGTGGAGGACACC |
| | | GGAGTGTACTATTGTGCGCGCGCCAACTACAAGAGAGAGCTGCGGTAC |
| | | TACTACGGAATGGACGTCTGGGGACAGGGAACTATGGTGACCGTGTCA |
| | | TCCGGTGGAGGGGGAAGCGGCGGTGGAGGCAGCGGGGGCGGGGGTTCA |
| | | GAAATTGTCATGACCCAGTCCCCGGGAACTCTTTCCCTCTCCCCCGGG |
| | | GAATCCGCGACTTTGTCCTGCCGGGCCAGCCAGCGCGTGGCCTCGAAC |
| | | TACCTCGCATGGTACCAGCATAAGCCAGGCCAAGCCCCTTCCCTGCTG |
| | | ATTTCCGGGGCTAGCAGCCGCGCCACTGGCGTGCCGGATAGGTTCTCG |
| | | GGAAGCGGCTCGGGTACCGATTTCACCCTGGCAATCTCGCGGCTGGAA |
| | | CCGGAGGATTCGGCCGTGTACTACTGCCAGCACTATGACTCATCCCCC |
| | | TCCTGGACATTCGGACAGGGCACCAAGGTCGAGATCAAGACCACTACC |
| | | CCAGCACCGAGGCCACCCACCCCGGCTCCTACCATCGCCTCCCAGCCT |
| | | CTGTCCCTGCGTCCGGAGGCATGTAGACCCGCAGCTGGTGGGGCCGTG |
| | | CATACCCGGGGTCTTGACTTCGCCTGCGATATCTACATTTGGGCCCCT |
| | | CTGGCTGGTACTTGCGGGGTCCTGCTGCTTTCACTCGTGATCACTCTT |
| | | TACTGTAAGCGCGGTCGGAAGAAGCTGCTGTACATCTTTAAGCAACCC |
| | | TTCATGAGGCCTGTGCAGACTACTCAAGAGGAGGACGGCTGTTCATGC |
| | | CGGTTCCCAGAGGAGGAGGAAGGCGGCTGCGAACTGCGCGTGAAATTC |
| | | AGCCGCAGCGCAGATGCTCCAGCCTACAAGCAGGGGCAGAACCAGCTC |
| | | TACAACGAACTCAATCTTGGTCGGAGAGAGGAGTACGACGTGCTGGAC |
| | | AAGCGGAGAGGACGGGACCCAGAAATGGGCGGGAAGCCGCGCAGAAAG |
| | | AATCCCCAAGAGGGCCTGTACAACGAGCTCCAAAAGGATAAGATGGCA |
| | | GAAGCCTATAGCGAGATTGGTATGAAAGGGGAACGCAGAAGAGGCAAA |
| | | GGCCACGACGGACTGTACCAGGGACTCAGCACCGCCACCAAGGACACC |
| | | TATGACGCTCTTCACATGCAGGCCCTGCCGCCTCGG |

BCMA_EBB-C1978-D4

| | | |
|---|---|---|
| BCMA_EBB- | 1159 | EVQLLETGGGLVQPGGSLRLSCAASGFSFSSYAMSWVRQAPGKGLEWV |
| C1978- | | SAISGSGGSTYYADSVKGRFTISRDNSKNTLYLQMNSLRAEDTAVYYC |
| D4-aa | | AKALVGATGAFDIWGQGTLVTVSSGGGGSGGGGSGGGGSEIVLTQSPG |
| ScFv | | TLSLSPGERATLSCRASQSLSSNFLAWYQQKPGQAPGLLIYGASNWAT |
| domain | | GTPDRFSGSGSGTDFTLTITRLEPEDFAVYYCQYYGTSPMYTFGQGTK |
| | | VEIK |
| BCMA_EBB- | 1160 | GAAGTGCAGCTGCTCGAAACCGGTGGAGGGCTGGTGCAGCCAGGGGGC |
| C1978- | | TCCCTGAGGCTTTCATGCGCCGCTAGCGGATTCTCCTTCTCCTCTTAC |
| D4-nt | | GCCATGTCGTGGGTCCGCCAAGCCCCTGGAAAAGGCCTGGAATGGGTG |
| ScFv | | TCCGCGATTTCCGGGAGCGGAGGTTCGACCTATTACGCCGACTCCGTG |
| domain | | AAGGGCCGCTTTACCATCTCCCGGGATAACTCCAAGAACACTCTGTAC |
| | | CTCCAAATGAACTCGCTGAGAGCCGAGGACACCGCCGTGTATTACTGC |
| | | GCGAAGGCGCTGGTCGGCGCGACTGGGGCATTCGACATCTGGGGACAG |
| | | GGAACTCTTGTGACCGTGTCGAGCGGAGGCGGCGGCTCCGGCGGAGGA |
| | | GGGAGCGGGGGCGGTGGTTCCGAAATCGTGTTGACTCAGTCCCCGGGA |
| | | ACCCTGAGCTTGTCACCCGGGGAGCGGGCCACTCTCTCCTGTCGCGCC |
| | | TCCCAATCGCTCTCATCCAATTTCCTGGCCTGGTACCAGCAGAAGCCC |
| | | GGACAGGCCCCGGGCCTGCTCATCTACGGCGCTTCAAACTGGGCAACG |
| | | GGAACCCCTGATCGGTTCAGCGGAAGCGGATCGGGTACTGACTTTACC |
| | | CTGACCATCACCAGACTGGAACCGGAGGACTTCGCCGTGTACTACTGC |
| | | CAGTACTACGGCACCTCCCCCATGTACACATTCGGACAGGGTACCAAG |
| | | GTCGAGATTAAG |
| BCMA_EBB- | 1161 | EVQLLETGGGLVQPGGSLRLSCAASGFSFSSYAMSWVRQAPGKGLEWV |
| C1978- | | SAISGSGGSTYYADSVKGRFTISRDNSKNTLYLQMNSLRAEDTAVYYC |
| D4-aa | | AKALVGATGAFDIWGQGTLVTVSS |
| VH | | |
| BCMA_EBB- | 1162 | EIVLTQSPGTLSLSPGERATLSCRASQSLSSNFLAWYQQKPGQAPGLL |
| C1978- | | IYGASNWATGTPDRFSGSGSGTDFTLTITRLEPEDFAVYYCQYYGTSP |
| D4-aa | | MYTFGQGTKVEIK |
| VL | | |
| BCMA_EBB- | 1163 | MALPVTALLLPLALLLHAARPEVQLLETGGGLVQPGGSLRLSCAASGF |
| C1978- | | SFSSYAMSWVRQAPGKGLEWVSAISGSGGSTYYADSVKGRFTISRDNS |
| D4-aa | | KNTLYLQMNSLRAEDTAVYYCAKALVGATGAFDIWGQGTLVTVSSGGG |
| Full CART | | GSGGGGSGGGGSEIVLTQSPGTLSLSPGERATLSCRASQSLSSNFLAW |
| | | YQQKPGQAPGLLIYGASNWATGTPDRFSGSGSGTDFTLTITRLEPEDF |
| | | AVYYCQYYGTSPMYTFGQGTKVEIKTTTPAPRPPTPAPTIASQPLSLR |
| | | PEACRPAAGGAVHTRGLDFACDIYIWAPLAGTCGVLLLSLVITLYCKR |
| | | GRKKLLYIFKQPFMRPVQTTQEEDGCSCRFPEEEEGGCELRVKFSRSA |
| | | DAPAYKQGQNQLYNELNLGRREEYDVLDKRRGRDPEMGGKPRRKNPQE |
| | | GLYNELQKDKMAEAYSEIGMKGERRRGKGHDGLYQGLSTATKDTYDAL |
| | | HMQALPPR |
| BCMA_EBB- | 1164 | ATGGCCCTCCCTGTCACCGCCCTGCTGCTTCCGCTGGCTCTTCTGCTC |
| C1978- | | CACGCCGCTCGGCCCGAAGTGCAGCTGCTCGAAACCGGTGGAGGGCTG |
| D4-nt | | GTGCAGCCAGGGGGCTCCCTGAGGCTTTCATGCGCCGCTAGCGGATTC |
| Full CART | | TCCTTCTCCTCTTACGCCATGTCGTGGGTCCGCCAAGCCCCTGGAAAA |
| | | GGCCTGGAATGGGTGTCCGCGATTTCCGGGAGCGGAGGTTCGACCTAT |
| | | TACGCCGACTCCGTGAAGGGCCGCTTTACCATCTCCCGGGATAACTCC |
| | | AAGAACACTCTGTACCTCCAAATGAACTCGCTGAGAGCCGAGGACACC |
| | | GCCGTGTATTACTGCGCGAAGGCGCTGGTCGGCGCGACTGGGGCATTC |
| | | GACATCTGGGGACAGGGAACTCTTGTGACCGTGTCGAGCGGAGGCGGC |
| | | GGCTCCGGCGGAGGAGGGAGCGGGGGCGGTGGTTCCGAAATCGTGTTG |
| | | ACTCAGTCCCCGGGAACCCTGAGCTTGTCACCCGGGGAGCGGGCCACT |
| | | CTCTCCTGTCGCGCCTCCCAATCGCTCTCATCCAATTTCCTGGCCTGG |
| | | TACCAGCAGAAGCCCGGACAGGCCCCGGGCCTGCTCATCTACGGCGCT |
| | | TCAAACTGGGCAACGGGAACCCCTGATCGGTTCAGCGGAAGCGGATCG |
| | | GGTACTGACTTTACCCTGACCATCACCAGACTGGAACCGGAGGACTTC |
| | | GCCGTGTACTACTGCCAGTACTACGGCACCTCCCCCATGTACACATTC |
| | | GGACAGGGTACCAAGGTCGAGATTAAGACCACTACCCCAGCACCGAGG |
| | | CCACCCACCCCGGCTCCTACCATCGCCTCCCAGCCTCTGTCCCTGCGT |
| | | CCGGAGGCATGTAGACCCGCAGCTGGTGGGGCCGTGCATACCCGGGGT |
| | | CTTGACTTCGCCTGCGATATCTACATTTGGGCCCCTCTGGCTGGTACT |
| | | TGCGGGGTCCTGCTGCTTTCACTCGTGATCACTCTTTACTGTAAGCGC |
| | | GGTCGGAAGAAGCTGCTGTACATCTTTAAGCAACCCTTCATGAGGCCT |
| | | GTGCAGACTACTCAAGAGGAGGACGGCTGTTCATGCCGGTTCCCAGAG |
| | | GAGGAGGAAGGCGGCTGCGAACTGCGCGTGAAATTCAGCCGCAGCGCA |
| | | GATGCTCCAGCCTACAAGCAGGGGCAGAACCAGCTCTACAACGAACTC |
| | | AATCTTGGTCGGAGAGAGGAGTACGACGTGCTGGACAAGCGGAGAGGA |
| | | CGGGACCCAGAAATGGGCGGGAAGCCGCGCAGAAAGAATCCCCAAGAG |
| | | GGCCTGTACAACGAGCTCCAAAAGGATAAGATGGCAGAAGCCTATAGC |
| | | GAGATTGGTATGAAAGGGGAACGCAGAAGAGGCAAAGGCCACGACGGA |
| | | CTGTACCAGGGACTCAGCACCGCCACCAAGGACACCTATGACGCTCTT |
| | | CACATGCAGGCCCTGCCGCCTCGG |

BCMA_EBB-C1980-A2

| | | |
|---|---|---|
| BCMA_EBB- | 1165 | EVQLLESGGGLVQPGGSLRLSCAASGFTFSSYAMSWVRQAPGKGLEWV |
| C1980- | | SAISGSGGSTYYADSVKGRFTISRDNSKNTLYLQMNSLRAEDTAVYYC |
| A2-aa | | VLWFGEGFDPWGQGTLVTVSSGGGGSGGGGSGGGGSDIVLTQSPLSLP |
| ScFv | | VTPGEPASISCRSSQSLLHSNGYNYLDWYLQKPGQSPQLLIYLGSNRA |
| domain | | SGVPDRFSGSGSGTDFTLKISRVEAEDVGVYYCMQALQTPLTFGGGTK |
| | | VDIK |
| BCMA_EBB- | 1166 | GAAGTGCAGCTGCTTGAGAGCGGTGGAGGTCTGGTGCAGCCCGGGGGA |
| C1980- | | TCACTGCGCCTGTCCTGTGCCGCGTCCGGTTTCACTTTCTCCTCGTAC |
| A2-nt | | GCCATGTCGTGGGTCAGACAGGCACCGGGAAAGGGACTGGAATGGGTG |
| ScFv | | TCAGCCATTTCGGGTTCGGGGGGCAGCACCTACTACGCTGACTCCGTG |
| domain | | AAGGGCCGGTTCACCATTTCCCGCGACAACTCCAAGAACACCTTGTAC |
| | | CTCCAAATGAACTCCCTGCGGGCCGAAGATACCGCCGTGTATTACTGC |
| | | GTGCTGTGGTTCGGAGAGGGATTCGACCCGTGGGGACAAGGAACACTC |
| | | GTGACTGTGTCATCCGGCGGAGGCGGCAGCGGTGGCGGCGGTTCCGGC |
| | | GGCGGCGGATCTGACATCGTGTTGACCCAGTCCCCTCTGAGCCTGCCG |
| | | GTCACTCCTGGCGAACCAGCCAGCATCTCCTGCCGGTCGAGCCAGTCC |
| | | CTCCTGCACTCCAATGGGTACAACTACCTCGATTGGTATCTGCAAAAG |
| | | CCGGGCCAGAGCCCCCAGCTGCTGATCTACCTTGGGTCAAACCGCGCT |
| | | TCCGGGGTGCCTGATAGATTCTCCGGGTCCGGGAGCGGAACCGACTTT |
| | | ACCCTGAAAATCTCGAGGGTGGAGGCCGAGGACGTCGGAGTGTACTAC |
| | | TGCATGCAGGCGCTCCAGACTCCCCTGACCTTCGGAGGAGGAACGAAG |
| | | GTCGACATCAAGA |
| BCMA_EBB- | 1167 | EVQLLESGGGLVQPGGSLRLSCAASGFTFSSYAMSWVRQAPGKGLEWV |
| C1980- | | SAISGSGGSTYYADSVKGRFTISRDNSKNTLYLQMNSLRAEDTAVYYC |
| A2-aa | | VLWFGEGFDPWGQGTLVTVSS |
| VH | | |
| BCMA_EBB- | 1168 | DIVLTQSPLSLPVTPGEPASISCRSSQSLLHSNGYNYLDWYLQKPGQS |
| C1980- | | PQLLIYLGSNRASGVPDRFSGSGSGTDFTLKISRVEAEDVGVYYCMQA |
| A2-aa | | LQTPLTFGGGTKVDIK |
| VL | | |
| BCMA_EBB- | 1169 | MALPVTALLLPLALLLHAARPEVQLLESGGGLVQPGGSLRLSCAASGF |
| C1980- | | TFSSYAMSWVRQAPGKGLEWVSAISGSGGSTYYADSVKGRFTISRDNS |
| A2-aa | | KNTLYLQMNSLRAEDTAVYYCVLWFGEGFDPWGQGTLVTVSSGGGGSG |
| Full CART | | GGGSGGGGSDIVLTQSPLSLPVTPGEPASISCRSSQSLLHSNGYNYLD |
| | | WYLQKPGQSPQLLIYLGSNRASGVPDRFSGSGSGTDFTLKISRVEAED |
| | | VGVYYCMQALQTPLTFGGGTKVDIKTTTPAPRPPTPAPTIASQPLSLR |
| | | PEACRPAAGGAVHTRGLDFACDIYIWAPLAGTCGVLLLSLVITLYCKR |
| | | GRKKLLYIFKQPFMRPVQTTQEEDGCSCRFPEEEEGGCELRVKFSRSA |
| | | DAPAYKQGQNQLYNELNLGRREEYDVLDKRRGRDPEMGGKPRRKNPQE |
| | | GLYNELQKDKMAEAYSEIGMKGERRRGKGHDGLYQGLSTATKDTYDAL |
| | | HMQALPPR |
| BCMA_EBB- | 1170 | ATGGCCCTCCCTGTCACCGCCCTGCTGCTTCCGCTGGCTCTTCTGCTC |
| C1980- | | CACGCCGCTCGGCCCGAAGTGCAGCTGCTTGAGAGCGGTGGAGGTCTG |
| A2-nt | | GTGCAGCCCGGGGGATCACTGCGCCTGTCCTGTGCCGCGTCCGGTTTC |
| Full CART | | ACTTTCTCCTCGTACGCCATGTCGTGGGTCAGACAGGCACCGGGAAAG |
| | | GGACTGGAATGGGTGTCAGCCATTTCGGGTTCGGGGGGCAGCACCTAC |
| | | TACGCTGACTCCGTGAAGGGCCGGTTCACCATTTCCCGCGACAACTCC |
| | | AAGAACACCTTGTACCTCCAAATGAACTCCCTGCGGGCCGAAGATACC |
| | | GCCGTGTATTACTGCGTGCTGTGGTTCGGAGAGGGATTCGACCCGTGG |
| | | GGACAAGGAACACTCGTGACTGTGTCATCCGGCGGAGGCGGCAGCGGT |
| | | GGCGGCGGTTCCGGCGGCGGCGGATCTGACATCGTGTTGACCCAGTCC |
| | | CCTCTGAGCCTGCCGGTCACTCCTGGCGAACCAGCCAGCATCTCCTGC |
| | | CGGTCGAGCCAGTCCCTCCTGCACTCCAATGGGTACAACTACCTCGAT |
| | | TGGTATCTGCAAAAGCCGGGCCAGAGCCCCCAGCTGCTGATCTACCTT |
| | | GGGTCAAACCGCGCTTCCGGGGTGCCTGATAGATTCTCCGGGTCCGGG |
| | | AGCGGAACCGACTTTACCCTGAAAATCTCGAGGGTGGAGGCCGAGGAC |
| | | GTCGGAGTGTACTACTGCATGCAGGCGCTCCAGACTCCCCTGACCTTC |
| | | GGAGGAGGAACGAAGGTCGACATCAAGACCACTACCCCAGCACCGAGG |
| | | CCACCCACCCCGGCTCCTACCATCGCCTCCCAGCCTCTGTCCCTGCGT |
| | | CCGGAGGCATGTAGACCCGCAGCTGGTGGGGCCGTGCATACCCGGGGT |
| | | CTTGACTTCGCCTGCGATATCTACATTTGGGCCCCTCTGGCTGGTACT |
| | | TGCGGGGTCCTGCTGCTTTCACTCGTGATCACTCTTTACTGTAAGCGC |
| | | GGTCGGAAGAAGCTGCTGTACATCTTTAAGCAACCCTTCATGAGGCCT |
| | | GTGCAGACTACTCAAGAGGAGGACGGCTGTTCATGCCGGTTCCCAGAG |
| | | GAGGAGGAAGGCGGCTGCGAACTGCGCGTGAAATTCAGCCGCAGCGCA |
| | | GATGCTCCAGCCTACAAGCAGGGGCAGAACCAGCTCTACAACGAACTC |
| | | AATCTTGGTCGGAGAGAGGAGTACGACGTGCTGGACAAGCGGAGAGGA |
| | | CGGGACCCAGAAATGGGCGGGAAGCCGCGCAGAAAGAATCCCCAAGAG |
| | | GGCCTGTACAACGAGCTCCAAAAGGATAAGATGGCAGAAGCCTATAGC |
| | | GAGATTGGTATGAAAGGGGAACGCAGAAGAGGCAAAGGCCACGACGGA |
| | | CTGTACCAGGGACTCAGCACCGCCACCAAGGACACCTATGACGCTCTT |
| | | CACATGCAGGCCCTGCCGCCTCGG |

BCMA_EBB-C1981-C3

| | | |
|---|---|---|
| BCMA_EBB- | 1171 | QVQLVESGGGLVQPGGSLRLSCAASGFTFSSYAMSWVRQAPGKGLEWV |
| C1981- | | SAISGSGGSTYYADSVKGRFTISRDNSKNTLYLQMNSLRAEDTAVYYC |
| C3-aa | | AKVGYDSSGYYRDYYGMDVWGQGTTVTVSSGGGGSGGGGSGGGGSEIV |
| ScFv | | LTQSPGTLSLSPGERATLSCRASQSVSSSYLAWYQQKPGQAPRLLIYG |
| domain | | TSSRATGISDRFSGSGSGTDFTLTISRLEPEDFAVYYCQHYGNSPPKF |
| | | TFGPGTKLEIK |
| BCMA_EBB- | 1172 | CAAGTGCAGCTCGTGGAGTCAGGCGGAGGACTGGTGCAGCCCGGGGGC |
| C1981- | | TCCCTGAGACTTTCCTGCGCGGCATCGGGTTTTACCTTCTCCTCCTAT |
| C3-nt | | GCTATGTCCTGGGTGCGCCAGGCCCCGGGAAAGGGACTGGAATGGGTG |
| ScFv | | TCCGCAATCAGCGGTAGCGGGGGCTCAACATACTACGCCGACTCCGTC |
| domain | | AAGGGTCGCTTCACTATTTCCCGGGACAACTCCAAGAATACCCTGTAC |
| | | CTCCAAATGAACAGCCTCAGGGCCGAGGATACTGCCGTGTACTACTGC |
| | | GCCAAAGTCGGATACGATAGCTCCGGTTACTACCGGGACTACTACGGA |
| | | ATGGACGTGTGGGGACAGGGCACCACCGTGACCGTGTCAAGCGGCGGA |
| | | GGCGGTTCAGGAGGGGGAGGCTCCGGCGGTGGAGGGTCCGAAATCGTC |
| | | CTGACTCAGTCGCCTGGCACTCTGTCGTTGTCCCCGGGGGAGCGCGCT |
| | | ACCCTGTCGTGTCGGGCGTCGCAGTCCGTGTCGAGCTCCTACCTCGCG |
| | | TGGTACCAGCAGAAGCCCGGACAGGCCCCTAGACTTCTGATCTACGGC |
| | | ACTTCTTCACGCGCCACCGGGATCAGCGACAGGTTCAGCGGCTCCGGC |
| | | TCCGGGACCGACTTCACCCTGACCATTAGCCGGCTGGAGCCTGAAGAT |
| | | TTCGCCGTGTATTACTGCCAACACTACGGAAACTCGCCGCCAAAGTTC |
| | | ACGTTCGGACCCGGAACCAAGCTGGAAATCAAG |
| BCMA_EBB- | 1173 | QVQLVESGGGLVQPGGSLRLSCAASGFTFSSYAMSWVRQAPGKGLEWV |
| C1981- | | SAISGSGGSTYYADSVKGRFTISRDNSKNTLYLQMNSLRAEDTAVYYC |
| C3-aa | | AKVGYDSSGYYRDYYGMDVWGQGTTVTVSS |
| VH | | |
| BCMA_EBB- | 1174 | EIVLTQSPGTLSLSPGERATLSCRASQSVSSSYLAWYQQKPGQAPRLL |
| C1981- | | IYGTSSRATGISDRFSGSGSGTDFTLTISRLEPEDFAVYYCQHYGNSP |
| C3-aa | | PKFTFGPGTKLEIK |
| VL | | |
| BCMA_EBB- | 1175 | MALPVTALLLPLALLLHAARPQVQLVESGGGLVQPGGSLRLSCAASGF |
| C1981- | | TFSSYAMSWVRQAPGKGLEWVSAISGSGGSTYYADSVKGRFTISRDNS |
| C3-aa | | KNTLYLQMNSLRAEDTAVYYCAKVGYDSSGYYRDYYGMDVWGQGTTVT |
| Full CART | | VSSGGGGSGGGGSGGGGSEIVLTQSPGTLSLSPGERATLSCRASQSVS |
| | | SSYLAWYQQKPGQAPRLLIYGTSSRATGISDRFSGSGSGTDFTLTISR |
| | | LEPEDFAVYYCQHYGNSPPKFTFGPGTKLEIKTTTPAPRPPTPAPTIA |
| | | SQPLSLRPEACRPAAGGAVHTRGLDFACDIYIWAPLAGTCGVLLLSLV |
| | | ITLYCKRGRKKLLYIFKQPFMRPVQTTQEEDGCSCRFPEEEEGGCELR |
| | | VKFSRSADAPAYKQGQNQLYNELNLGRREEYDVLDKRRGRDPEMGGKP |
| | | RRKNPQEGLYNELQKDKMAEAYSEIGMKGERRRGKGHDGLYQGLSTAT |
| | | KDTYDALHMQALPPR |
| BCMA_EBB- | 1176 | ATGGCCCTCCCTGTCACCGCCCTGCTGCTTCCGCTGGCTCTTCTGCTC |
| C1981- | | CACGCCGCTCGGCCCCAAGTGCAGCTCGTGGAGTCAGGCGGAGGACTG |
| C3-nt | | GTGCAGCCCGGGGGCTCCCTGAGACTTTCCTGCGCGGCATCGGGTTTT |
| Full CART | | ACCTTCTCCTCCTATGCTATGTCCTGGGTGCGCCAGGCCCCGGGAAAG |
| | | GGACTGGAATGGGTGTCCGCAATCAGCGGTAGCGGGGGCTCAACATAC |
| | | TACGCCGACTCCGTCAAGGGTCGCTTCACTATTTCCCGGGACAACTCC |
| | | AAGAATACCCTGTACCTCCAAATGAACAGCCTCAGGGCCGAGGATACT |
| | | GCCGTGTACTACTGCGCCAAAGTCGGATACGATAGCTCCGGTTACTAC |
| | | CGGGACTACTACGGAATGGACGTGTGGGGACAGGGCACCACCGTGACC |
| | | GTGTCAAGCGGCGGAGGCGGTTCAGGAGGGGGAGGCTCCGGCGGTGGA |
| | | GGGTCCGAAATCGTCCTGACTCAGTCGCCTGGCACTCTGTCGTTGTCC |
| | | CCGGGGGAGCGCGCTACCCTGTCGTGTCGGGCGTCGCAGTCCGTGTCG |
| | | AGCTCCTACCTCGCGTGGTACCAGCAGAAGCCCGGACAGGCCCCTAGA |
| | | CTTCTGATCTACGGCACTTCTTCACGCGCCACCGGGATCAGCGACAGG |
| | | TTCAGCGGCTCCGGCTCCGGGACCGACTTCACCCTGACCATTAGCCGG |
| | | CTGGAGCCTGAAGATTTCGCCGTGTATTACTGCCAACACTACGGAAAC |
| | | TCGCCGCCAAAGTTCACGTTCGGACCCGGAACCAAGCTGGAAATCAAG |
| | | ACCACTACCCCAGCACCGAGGCCACCCACCCCGGCTCCTACCATCGCC |
| | | TCCCAGCCTCTGTCCCTGCGTCCGGAGGCATGTAGACCCGCAGCTGGT |
| | | GGGGCCGTGCATACCCGGGGTCTTGACTTCGCCTGCGATATCTACATT |
| | | TGGGCCCCTCTGGCTGGTACTTGCGGGGTCCTGCTGCTTTCACTCGTG |
| | | ATCACTCTTTACTGTAAGCGCGGTCGGAAGAAGCTGCTGTACATCTTT |
| | | AAGCAACCCTTCATGAGGCCTGTGCAGACTACTCAAGAGGAGGACGGC |
| | | TGTTCATGCCGGTTCCCAGAGGAGGAGGAAGGCGGCTGCGAACTGCGC |
| | | GTGAAATTCAGCCGCAGCGCAGATGCTCCAGCCTACAAGCAGGGGCAG |
| | | AACCAGCTCTACAACGAACTCAATCTTGGTCGGAGAGAGGAGTACGAC |
| | | GTGCTGGACAAGCGGAGAGGACGGGACCCAGAAATGGGCGGGAAGCCG |
| | | CGCAGAAAGAATCCCCAAGAGGGCCTGTACAACGAGCTCCAAAAGGAT |
| | | AAGATGGCAGAAGCCTATAGCGAGATTGGTATGAAAGGGGAACGCAGA |
| | | AGAGGCAAAGGCCACGACGGACTGTACCAGGGACTCAGCACCGCCACC |
| | | AAGGACACCTATGACGCTCTTCACATGCAGGCCCTGCCGCCTCGG |

BCMA_EBB-C1978-G4

| | | |
|---|---|---|
| BCMA_EBB- | 1177 | EVQLVESGGGLVQPGGSLRLSCAASGFTFSSYAMSWVRQAPGKGLEWV |
| C1978- | | SAISGSGGSTYYADSVKGRFTISRDNSKNTLYLQMNSLRAEDTAVYYC |
| G4-aa | | AKMGWSSGYLGAFDIWGQGTTVTVSSGGGGSGGGGSGGGGSEIVLTQS |
| ScFv | | PGTLSLSPGERATLSCRASQSVASSFLAWYQQKPGQAPRLLIYGASGR |
| domain | | ATGIPDRFSGSGSGTDFTLTISRLEPEDFAVYYCQHYGGSPRLTFGGG |
| | | TKVDIK |
| BCMA_EBB- | 1178 | GAAGTCCAACTGGTGGAGTCCGGGGGAGGGCTCGTGCAGCCCGGAGGC |
| C1978- | | AGCCTTCGGCTGTCGTGCGCCGCCTCCGGGTTCACGTTCTCATCCTAC |
| G4-nt | | GCGATGTCGTGGGTCAGACAGGCACCAGGAAAGGGACTGGAATGGGTG |
| ScFv | | TCCGCCATTAGCGGCTCCGGCGGTAGCACCTACTATGCCGACTCAGTG |
| domain | | AAGGGAAGGTTCACTATCTCCCGCGACAACAGCAAGAACACCCTGTAC |
| | | CTCCAAATGAACTCTCTGCGGGCCGAGGATACCGCGGTGTACTATTGC |
| | | GCCAAGATGGGTTGGTCCAGCGGATACTTGGGAGCCTTCGACATTTGG |
| | | GGACAGGGCACTACTGTGACCGTGTCCTCCGGGGGTGGCGGATCGGGA |
| | | GGCGGCGGCTCGGGTGGAGGGGGTTCCGAAATCGTGTTGACCCAGTCA |
| | | CCGGGAACCCTCTCGCTGTCCCCGGGAGAACGGGCTACACTGTCATGT |
| | | AGAGCGTCCCAGTCCGTGGCTTCCTCGTTCCTGGCCTGGTACCAGCAG |
| | | AAGCCGGGACAGGCACCCCGCCTGCTCATCTACGGAGCCAGCGGCCGG |
| | | GCGACCGGCATCCCTGACCGCTTCTCCGGTTCCGGCTCGGGCACCGAC |
| | | TTTACTCTGACCATTAGCAGGCTTGAGCCCGAGGATTTTGCCGTGTAC |
| | | TACTGCCAACACTACGGGGGGAGCCCTCGCCTGACCTTCGGAGGCGGA |
| | | ACTAAGGTCGATATCAAAA |
| BCMA_EBB- | 1179 | EVQLVESGGGLVQPGGSLRLSCAASGFTFSSYAMSWVRQAPGKGLEWV |
| C1978- | | SAISGSGGSTYYADSVKGRFTISRDNSKNTLYLQMNSLRAEDTAVYYC |
| G4-aa | | AKMGWSSGYLGAFDIWGQGTTVTVSS |
| VH | | |
| BCMA_EBB- | 1180 | EIVLTQSPGTLSLSPGERATLSCRASQSVASSFLAWYQQKPGQAPRLL |
| C1978- | | IYGASGRATGIPDRFSGSGSGTDFTLTISRLEPEDFAVYYCQHYGGSP |
| G4-aa | | RLTFGGGTKVDIK |
| VL | | |
| BCMA_EBB- | 1181 | MALPVTALLLPLALLLHAARPEVQLVESGGGLVQPGGSLRLSCAASGF |
| C1978- | | TFSSYAMSWVRQAPGKGLEWVSAISGSGGSTYYADSVKGRFTISRDNS |
| G4-aa | | KNTLYLQMNSLRAEDTAVYYCAKMGWSSGYLGAFDIWGQGTTVTVSSG |
| Full CART | | GGGSGGGGSGGGGSEIVLTQSPGTLSLSPGERATLSCRASQSVASSFL |
| | | AWYQQKPGQAPRLLIYGASGRATGIPDRFSGSGSGTDFTLTISRLEPE |
| | | DFAVYYCQHYGGSPRLTFGGGTKVDIKTTTPAPRPPTPAPTIASQPLS |
| | | LRPEACRPAAGGAVHTRGLDFACDIYIWAPLAGTCGVLLLSLVITLYC |
| | | KRGRKKLLYIFKQPFMRPVQTTQEEDGCSCRFPEEEEGGCELRVKFSR |
| | | SADAPAYKQGQNQLYNELNLGRREEYDVLDKRRGRDPEMGGKPRRKNP |
| | | QEGLYNELQKDKMAEAYSEIGMKGERRRGKGHDGLYQGLSTATKDTYD |
| | | ALHMQALPPR |
| BCMA_EBB- | 1182 | ATGGCCCTCCCTGTCACCGCCCTGCTGCTTCCGCTGGCTCTTCTGCTC |
| C1978- | | CACGCCGCTCGGCCCGAAGTCCAACTGGTGGAGTCCGGGGGAGGGCTC |
| G4-nt | | GTGCAGCCCGGAGGCAGCCTTCGGCTGTCGTGCGCCGCCTCCGGGTTC |
| Full CART | | ACGTTCTCATCCTACGCGATGTCGTGGGTCAGACAGGCACCAGGAAAG |
| | | GGACTGGAATGGGTGTCCGCCATTAGCGGCTCCGGCGGTAGCACCTAC |
| | | TATGCCGACTCAGTGAAGGGAAGGTTCACTATCTCCCGCGACAACAGC |
| | | AAGAACACCCTGTACCTCCAAATGAACTCTCTGCGGGCCGAGGATACC |
| | | GCGGTGTACTATTGCGCCAAGATGGGTTGGTCCAGCGGATACTTGGGA |
| | | GCCTTCGACATTTGGGGACAGGGCACTACTGTGACCGTGTCCTCCGGG |
| | | GGTGGCGGATCGGGAGGCGGCGGCTCGGGTGGAGGGGGTTCCGAAATC |
| | | GTGTTGACCCAGTCACCGGGAACCCTCTCGCTGTCCCCGGGAGAACGG |
| | | GCTACACTGTCATGTAGAGCGTCCCAGTCCGTGGCTTCCTCGTTCCTG |
| | | GCCTGGTACCAGCAGAAGCCGGGACAGGCACCCCGCCTGCTCATCTAC |
| | | GGAGCCAGCGGCCGGGCGACCGGCATCCCTGACCGCTTCTCCGGTTCC |
| | | GGCTCGGGCACCGACTTTACTCTGACCATTAGCAGGCTTGAGCCCGAG |
| | | GATTTTGCCGTGTACTACTGCCAACACTACGGGGGGAGCCCTCGCCTG |
| | | ACCTTCGGAGGCGGAACTAAGGTCGATATCAAAACCACTACCCCAGCA |
| | | CCGAGGCCACCCACCCCGGCTCCTACCATCGCCTCCCAGCCTCTGTCC |
| | | CTGCGTCCGGAGGCATGTAGACCCGCAGCTGGTGGGGCCGTGCATACC |
| | | CGGGGTCTTGACTTCGCCTGCGATATCTACATTTGGGCCCCTCTGGCT |
| | | GGTACTTGCGGGGTCCTGCTGCTTTCACTCGTGATCACTCTTTACTGT |
| | | AAGCGCGGTCGGAAGAAGCTGCTGTACATCTTTAAGCAACCCTTCATG |
| | | AGGCCTGTGCAGACTACTCAAGAGGAGGACGGCTGTTCATGCCGGTTC |
| | | CCAGAGGAGGAGGAAGGCGGCTGCGAACTGCGCGTGAAATTCAGCCGC |
| | | AGCGCAGATGCTCCAGCCTACAAGCAGGGGCAGAACCAGCTCTACAAC |
| | | GAACTCAATCTTGGTCGGAGAGAGGAGTACGACGTGCTGGACAAGCGG |
| | | AGAGGACGGGACCCAGAAATGGGCGGGAAGCCGCGCAGAAAGAATCCC |
| | | CAAGAGGGCCTGTACAACGAGCTCCAAAAGGATAAGATGGCAGAAGCC |
| | | TATAGCGAGATTGGTATGAAAGGGGAACGCAGAAGAGGCAAAGGCCAC |
| | | GACGGACTGTACCAGGGACTCAGCACCGCCACCAAGGACACCTATGAC |
| | | GCTCTTCACATGCAGGCCCTGCCGCCTCGG |

TABLE 8
Additional exemplary BCMA CAR sequences

| | | SEQ |
|---|---|---|
| | | ID |
| Name | Sequence | NO: |
| A7D12.2 | QIQLVQSGPDLKKPGETVKLSCKASGYTFTNFGMNWVKQAPGKGFKWMAWINTYTGESYFA | 1183 |
| VH | DDFKGRFAFSVETSATTAYLQINNLKTEDTATYFCARGEIYYGYDGGFAYWGQGTLVTVSA | |
| A7D12.2 | DVVMTQSHRFMSTSVGDRVSITCRASQDVNTAVSWYQQKPGQSPKLLIFSASYRYTGVPDR | 1184 |
| VL | FTGSGSGADFTLTISSVQAEDLAVYYCQQHYSTPWTFGGGTKLDIK | |
| A7D12.2 | QIQLVQSGPDLKKPGETVKLSCKASGYTFTNFGMNWVKQAPGKGFKWMAWINTYTGESYFA | 1185 |
| scFv | DDFKGRFAFSVETSATTAYLQINNLKTEDTATYFCARGEIYYGYDGGFAYWGQGTLVTVSA | |
| domain | GGGGSGGGGSGGGGSDVVMTQSHRFMSTSVGDRVSITCRASQDVNTAVSWYQQKPGQSPKL | |
| | LIFSASYRYTGVPDRFTGSGSGADFTLTISSVQAEDLAVYYCQQHYSTPWTFGGGTKLDIK | |
| A7D12.2 | QIQLVQSGPDLKKPGETVKLSCKASGYTFTNFGMNWVKQAPGKGFKWMAWINTYTGESYFA | 1186 |
| Full | DDFKGRFAFSVETSATTAYLQINNLKTEDTATYFCARGEIYYGYDGGFAYWGQGTLVTVSA | |
| CART | GGGGSGGGGSGGGGSDVVMTQSHRFMSTSVGDRVSITCRASQDVNTAVSWYQQKPGQSPKL | |
| | LIFSASYRYTGVPDRFTGSGSGADFTLTISSVQAEDLAVYYCQQHYSTPWTFGGGTKLDIK | |
| | TTTPAPRPPTPAPTIASQPLSLRPEACRPAAGGAVHTRGLDFACDIYIWAPLAGTCGVLLL | |
| | SLVITLYCKRGRKKLLYIFKQPFMRPVQTTQEEDGCSCRFPEEEEGGCELRVKFSRSADAP | |
| | AYKQGQNQLYNELNLGRREEYDVLDKRRGRDPEMGGKPRRKNPQEGLYNELQKDKMAEAYS | |
| | EIGMKGERRRGKGHDGLYQGLSTATKDTYDALHMQALPPR | |
| C11D5.3 | QIQLVQSGPELKKPGETVKISCKASGYTFTDYSINWVKRAPGKGLKWMGWINTETREPAYA | 1187 |
| VH | YDFRGRFAFSLETSASTAYLQINNLKYEDTATYFCALDYSYAMDYWGQGTSVTVSS | |
| C11D5.3 | DIVLTQSPASLAMSLGKRATISCRASESVSVIGAHLIHWYQQKPGQPPKLLIYLASNLETG | 1188 |
| VL | VPARFSGSGSGTDFTLTIDPVEEDDVAIYSCLQSRIFPRTFGGGTKLEIK | |
| C11D5.3 | QIQLVQSGPELKKPGETVKISCKASGYTFTDYSINWVKRAPGKGLKWMGWINTETREPAYA | 1189 |
| scFv | YDFRGRFAFSLETSASTAYLQINNLKYEDTATYFCALDYSYAMDYWGQGTSVTVSSGGGGS | |
| domain | GGGGSGGGGSQIQLVQSGPELKKPGETVKISCKASGYTFTDYSINWVKRAPGKGLKWMGWI | |
| | NTETREPAYAYDFRGRFAFSLETSASTAYLQINNLKYEDTATYFCALDYSYAMDYWGQGTS | |
| | VTVSS | |
| C11D5.3 | QIQLVQSGPELKKPGETVKISCKASGYTFTDYSINWVKRAPGKGLKWMGWINTETREPAYA | 1190 |
| Full | YDFRGRFAFSLETSASTAYLQINNLKYEDTATYFCALDYSYAMDYWGQGTSVTVSSGGGGS | |
| CART | GGGGSGGGGSQIQLVQSGPELKKPGETVKISCKASGYTFTDYSINWVKRAPGKGLKWMGWI | |
| | NTETREPAYAYDFRGRFAFSLETSASTAYLQINNLKYEDTATYFCALDYSYAMDYWGQGTS | |
| | VTVSSTTTPAPRPPTPAPTIASQPLSLRPEACRPAAGGAVHTRGLDFACDIYIWAPLAGTC | |
| | GVLLLSLVITLYCKRGRKKLLYIFKQPFMRPVQTTQEEDGCSCRFPEEEEGGCELRVKFSR | |
| | SADAPAYKQGQNQLYNELNLGRREEYDVLDKRRGRDPEMGGKPRRKNPQEGLYNELQKDKM | |
| | AEAYSEIGMKGERRRGKGHDGLYQGLSTATKDTYDALHMQALPPR | |
| C12A3.2 | QIQLVQSGPELKKPGETVKISCKASGYTFRHYSMNWVKQAPGKGLKWMGRINTESGVPIYA | 1191 |
| VH | DDFKGRFAFSVETSASTAYLVINNLKDEDTASYFCSNDYLYSLDFWGQGTALTVSS | |
| C12A3.2 | DIVLTQSPPSLAMSLGKRATISCRASESVTILGSHLIYWYQQKPGQPPTLLIQLASNVQTG | 1192 |
| VL | VPARFSGSGSRTDFTLTIDPVEEDDVAVYYCLQSRTIPRTFGGGTKLEIK | |
| C12A3.2 | QIQLVQSGPELKKPGETVKISCKASGYTFRHYSMNWVKQAPGKGLKWMGRINTESGVPIYA | 1193 |
| scFv | DDFKGRFAFSVETSASTAYLVINNLKDEDTASYFCSNDYLYSLDFWGQGTALTVSSGGGGS | |
| domain | GGGGSGGGGSDIVLTQSPPSLAMSLGKRATISCRASESVTILGSHLIYWYQQKPGQPPTLL | |
| | IQLASNVQTGVPARFSGSGSRTDFTLTIDPVEEDDVAVYYCLQSRTIPRTFGGGTKLEIK | |
| C12A3.2 | QIQLVQSGPELKKPGETVKISCKASGYTFRHYSMNWVKQAPGKGLKWMGRINTESGVPIYA | 1194 |
| Full | DDFKGRFAFSVETSASTAYLVINNLKDEDTASYFCSNDYLYSLDFWGQGTALTVSSGGGGS | |
| CART | GGGGSGGGGSDIVLTQSPPSLAMSLGKRATISCRASESVTILGSHLIYWYQQKPGQPPTLL | |
| | IQLASNVQTGVPARFSGSGSRTDFTLTIDPVEEDDVAVYYCLQSRTIPRTFGGGTKLEIKT | |
| | TTPAPRPPTPAPTIASQPLSLRPEACRPAAGGAVHTRGLDFACDTYIWAPLAGTCGVLLLS | |
| | LVITLYCKRGRKKLLYIFKQPFMRPVQTTQEEDGCSCRFPEEEEGGCELRVKFSRSADAPA | |
| | YKQGQNQLYNELNLGRREEYDVLDKRRGRDPEMGGKPRRKNPQEGLYNELQKDKMAEAYSE | |
| | IGMKGERRRGKGHDGLYQGLSTATKDTYDALHMQALPPR | |
| C13F12.1 | QIQLVQSGPELKKPGETVKISCKASGYTFTHYSMNWVKQAPGKGLKWMGRINTETGEPLYA | 1195 |
| VH | DDFKGRFAFSLETSASTAYLVINNLKNEDTATFFCSNDYLYSCDYWGQGTTLTVSS | |
| C13F12.1 | DIVLTQSPPSLAMSLGKRATISCRASESVTILGSHLIYWYQQKPGQPPTLLIQLASNVQTG | 1196 |
| VL | VPARFSGSGSRTDFTLTIDPVEEDDVAVYYCLQSRTIPRTFGGGTKLEIK | |
| C13F12.1 | QIQLVQSGPELKKPGETVKISCKASGYTFTHYSMNWVKQAPGKGLKWMGRINTETGEPLYA | 1197 |
| scFv | DDFKGRFAFSLETSASTAYLVINNLKNEDTATFFCSNDYLYSCDYWGQGTTLTVSSGGGGS | |
| domain | GGGGSGGGGSDIVLTQSPPSLAMSLGKRATISCRASESVTILGSHLIYWYQQKPGQPPTLL | |
| | IQLASNVQTGVPARFSGSGSRTDFTLTIDPVEEDDVAVYYCLQSRTIPRTFGGGTKLEIK | |
| C13F12.1 | QIQLVQSGPELKKPGETVKISCKASGYTFTHYSMNWVKQAPGKGLKWMGRINTETGEPLYA | 1198 |
| Full | DDFKGRFAFSLETSASTAYLVINNLKNEDTATFFCSNDYLYSCDYWGQGTTLTVSSGGGGS | |
| CART | GGGGSGGGGSDIVLTQSPPSLAMSLGKRATISCRASESVTILGSHLIYWYQQKPGQPPTLL | |
| | IQLASNVQTGVPARFSGSGSRTDFTLTIDPVEEDDVAVYYCLQSRTIPRTFGGGTKLEIKT | |
| | TTPAPRPPTPAPTIASQPLSLRPEACRPAAGGAVHTRGLDFACDTYIWAPLAGTCGVLLLS | |
| | LVITLYCKRGRKKLLYIFKQPFMRPVQTTQEEDGCSCRFPEEEEGGCELRVKFSRSADAPA | |
| | YKQGQNQLYNELNLGRREEYDVLDKRRGRDPEMGGKPRRKNPQEGLYNELQKDKMAEAYSE | |
| | IGMKGERRRGKGHDGLYQGLSTATKDTYDALHMQALPPR | |

[0711] Exemplary BCMA CAR constructs disclose herein comprise an scFv (e.g., a scFv as disclosed in Table 7 or 8, optionally preceded with an optional leader sequence (e.g., SEQ ID NO: 401 and SEQ ID NO: 402 for exemplary leader amino acid and nucleotide sequences, respectively). The sequences of the scFv fragments (e.g., an ScFv from any of SEQ ID NOs: 967-1182, e.g., SEQ ID NOs: 967, 973, 979, 985, 991, 997, 1003, 1009, 1015, 1021, 1027, 1033, 1039, 1045, 1051, 1057, 1063, 1069, 1075, 1081, 1087, 1093, 1099, 1105, 1111, 1117, 1123, 1129, 1135, 1141, 1147, 1153, 1159, 1165, 1171, 1177, not including the optional leader sequence) are provided herein in Tables 7 or 8. The BCMA CAR construct can further include an optional hinge domain, e.g., a CD8 hinge domain (e.g., including the amino acid sequence of SEQ ID NO: 403 or encoded by a nucleic acid sequence of SEQ ID NO: 404); a transmembrane domain, e.g., a CD8 transmembrane domain (e.g., including the amino acid sequence of SEQ ID NO: 12 or encoded by the nucleotide sequence of SEQ ID NO: 13); an intracellular domain, e.g., a 4-1BB intracellular domain (e.g., including the amino acid sequence of SEQ ID NO: 14 or encoded by the nucleotide sequence of SEQ ID NO: 15; and a functional signaling domain, e.g., a CD3 zeta domain (e.g., including amino acid sequence of SEQ ID NO: 18 or 20, or encoded by the nucleotide sequence of SEQ ID NO: 19 or 21). In certain embodiments, the domains are contiguous with and in the same reading frame to form a single fusion protein. In other embodiments, the domain are in separate polypeptides, e.g., as in an RCAR molecule as described herein.

[0712] In certain embodiments, the full length BCMA CAR molecule includes the amino acid sequence of, or is encoded by the nucleotide sequence of, BCMA-1, BCMA-2, BCMA-3, BCMA-4, BCMA-5, BCMA-6, BCMA-7, BCMA-8, BCMA-9, BCMA-10, BCMA-11, BCMA-12, BCMA-13, BCMA-14, BCMA-15, 149362, 149363, 149364, 149365, 149366, 149367, 149368, 149369, BCMA_EBB-C1978-A4, BCMA_EBB-C1978-G1, BCMA_EBB-C1979-C1, BCMA_EBB-C1978-C7, BCMA_EBB-C1978-D10, BCMA_EBB-C1979-C12, BCMA_EBB-C1980-G4, BCMA_EBB-C1980-D2, BCMA_EBB-C1978-A10, BCMA_EBB-C1978-D4, BCMA_EBB-C1980-A2, BCMA_EBB-C1981-C3, BCMA_EBB-C1978-G4, A7D12.2, C11D5.3, C12A3.2, or C13F12.1 provided in Table 7 or 8, or a sequence substantially (e.g., 85%, 95-99% or higher) identical thereto.

[0713] In certain embodiments, the BCMA CAR molecule, or the anti-BCMA antigen binding domain, includes the scFv amino acid sequence of BCMA-1, BCMA-2, BCMA-3, BCMA-4, BCMA-5, BCMA-6, BCMA-7, BCMA-8, BCMA-9, BCMA-10, BCMA-11, BCMA-12, BCMA-13, BCMA-14, BCMA-15, 149362, 149363, 149364, 149365, 149366, 149367, 149368, 149369, BCMA_EBB-C1978-A4, BCMA_EBB-C1978-G1, BCMA_EBB-C1979-C1, BCMA_EBB-C1978-C7, BCMA_EBB-C1978-D10, BCMA_EBB-C1979-C12, BCMA_EBB-C1980-G4, BCMA_EBB-C1980-D2, BCMA_EBB-C1978-A10, BCMA_EBB-C1978-D4, BCMA_EBB-C1980-A2, BCMA_EBB-C1981-C3, BCMA_EBB-C1978-G4, A7D12.2, C11D5.3, C12A3.2, or C13F12.1 provided in Table 7 or 8 (with or without the leader sequence), or a sequence substantially identical (e.g., 85%, 95-99% or higher identical, or up to 20, 15, 10, 8, 6, 5, 4, 3, 2, or 1 amino acid changes, e.g., substitutions (e.g., conservative substitutions)) to any of the aforesaid sequences.

[0714] In certain embodiments, the BCMA CAR molecule, or the anti-BCMA antigen binding domain, includes the heavy chain variable region and/or the light chain variable region of BCMA-1, BCMA-2, BCMA-3, BCMA-4, BCMA-5, BCMA-6, BCMA-7, BCMA-8, BCMA-9, BCMA-10, BCMA-11, BCMA-12, BCMA-13, BCMA-14, BCMA-15, 149362, 149363, 149364, 149365, 149366, 149367, 149368, 149369, BCMA_EBB-C1978-A4, BCMA_EBB-C1978-G1, BCMA_EBB-C1979-C1, BCMA_EBB-C1978-C7, BCMA_EBB-C1978-D10, BCMA_EBB-C1979-C12, BCMA_EBB-C1980-G4, BCMA_EBB-C1980-D2, BCMA_EBB-C1978-A10, BCMA_EBB-C1978-D4, BCMA_EBB-C1980-A2, BCMA_EBB-C1981-C3, BCMA_EBB-C1978-G4, A7D12.2, C11D5.3, C12A3.2, or C13F12.1 provided in Table 7 or 8, or a sequence substantially identical (e.g., 85%, 95-99% or higher identical, or up to 20, 15, 10, 8, 6, 5, 4, 3, 2, or 1 amino acid changes, e.g., substitutions (e.g., conservative substitutions)) to any of the aforesaid sequences.

[0715] In certain embodiments, the BCMA CAR molecule, or the anti-BCMA antigen binding domain, includes one, two or three CDRs from the heavy chain variable region (e.g., HCDR1, HCDR2 and/or HCDR3), provided in Table 9; and/or one, two or three CDRs from the light chain variable region (e.g., LCDR1, LCDR2 and/or LCDR3) of BCMA-1, BCMA-2, BCMA-3, BCMA-4, BCMA-5, BCMA-6, BCMA-7, BCMA-8, BCMA-9, BCMA-10, BCMA-11, BCMA-12, BCMA-13, BCMA-14, BCMA-15, 149362, 149363, 149364, 149365, 149366, 149367, 149368, 149369, BCMA_EBB-C1978-A4,

[0716] BCMA_EBB-C1978-G1, BCMA_EBB-C1979-C1, BCMA_EBB-C1978-C7, BCMA_EBB-C1978-D10, BCMA_EBB-C1979-C12, BCMA_EBB-C1980-G4, BCMA_EBB-C1980-D2, BCMA_EBB-C1978-A10, BCMA_EBB-C1978-D4, BCMA_EBB-C1980-A2, BCMA_EBB-C1981-C3, BCMA_EBB-C1978-G4, A7D12.2, C11D5.3, C12A3.2, or C13F12.1, provided in Table 10; or a sequence substantially identical (e.g., 85%, 95-99% or higher identical, or up to 20, 15, 10, 8, 6, 5, 4, 3, 2, or 1 amino acid changes, e.g., substitutions (e.g., conservative substitutions)) to any of the aforesaid sequences.

[0717] In certain embodiments, the BCMA CAR molecule, or the anti-BCMA antigen binding domain, includes one, two or three CDRs from the heavy chain variable region (e.g., HCDR1, HCDR2 and/or HCDR3), provided in Table 11; and/or one, two or three CDRs from the light chain variable region (e.g., LCDR1, LCDR2 and/or LCDR3) of BCMA-1, BCMA-2, BCMA-3, BCMA-4, BCMA-5, BCMA-6, BCMA-7, BCMA-8, BCMA-9, BCMA-10, BCMA-11, BCMA-12, BCMA-13, BCMA-14, BCMA-15, 149362, 149363, 149364, 149365, 149366, 149367, 149368, 149369, BCMA_EBB-C1978-A4, BCMA_EBB-C1978-G1, BCMA_EBB-C1979-C1, BCMA_EBB-C1978-C7, BCMA_EBB-C1978-D10, BCMA_EBB-C1979-C12, BCMA_EBB-C1980-G4, BCMA_EBB-C1980-D2, BCMA_EBB-C1978-A10, BCMA_EBB-C1978-D4, BCMA_EBB-C1980-A2, BCMA_EBB-C1981-C3, BCMA_EBB-C1978-G4, A7D12.2, C11D5.3, C12A3.2, or C13F12.1, provided in Table 12; or a sequence substantially identical (e.g., 85%, 95-99% or higher identical, or up to 20, 15, 10, 8, 6, 5, 4, 3, 2, or 1 amino acid changes, e.g., substitutions (e.g., conservative substitutions)) to any of the aforesaid sequences.

[0718] In certain embodiments, the BCMA CAR molecule, or the anti-BCMA antigen binding domain, includes one, two or three CDRs from the heavy chain variable region (e.g., HCDR1, HCDR2 and/or HCDR3), provided in Table 13; and/or one, two or three CDRs from the light chain variable region (e.g., LCDR1, LCDR2 and/or LCDR3) of BCMA-1, BCMA-2, BCMA-3, BCMA-4, BCMA-5, BCMA-6, BCMA-7, BCMA-8, BCMA-9, BCMA-10, BCMA-11, BCMA-12, BCMA-13, BCMA-14, BCMA-15, 149362, 149363, 149364, 149365, 149366, 149367, 149368, 149369, BCMA_EBB-C1978-A4, BCMA_EBB-C1978-G1, BCMA_EBB-C1979-C1, BCMA_EBB-C1978-C7, BCMA_EBB-C1978-D10, BCMA_EBB-C1979-C12, BCMA_EBB-C1980-G4, BCMA_EBB-C1980-D2, BCMA_EBB-C1978-A10, BCMA_EBB-C1978-D4, BCMA_EBB-C1980-A2, BCMA_EBB-C1981-C3, BCMA_EBB-C1978-G4, A7D12.2, C11D5.3, C12A3.2, or C13F12.1, provided in Table 14; or a sequence substantially identical (e.g., 85%, 95-99% or higher identical, or up to 20, 15, 10, 8, 6, 5, 4, 3, 2, or 1 amino acid changes, e.g., substitutions (e.g., conservative substitutions)) to any of the aforesaid sequences.

[0719] The sequences of human CDR sequences of the scFv domains are shown in Tables 9, 11, and 13 for the heavy chain variable domains and in Tables 10, 12, and 14 for the light chain variable domains.

TABLE 9
Heavy Chain Variable Domain CDRs according to the Kabat numbering
scheme (Kabat et al. (1991), “Sequences of Proteins of
Immunological Interest,” 5th Ed. Public Health Service, National
Institutes of Health, Bethesda, MD)

| | | SEQ | | SEQ | | SEQ |
|---|---|---|---|---|---|---|
| | | ID | | ID | | ID |
| Candidate | HCDR1 | NO: | HCDR2 | NO: | HCDR3 | NO: |
| 139109 | NHGMS | 1199 | GIVYSGSTYYAASVKG | 1239 | HGGESDV | 1279 |
| 139103 | NYAMS | 1200 | GISRSGENTYYADSV | 1240 | SPAHYYGGMDV | 1280 |
| | | | KG | | | |
| 139105 | DYAMH | 1201 | GISWNSGSIGYADSV | 1241 | HSFLAY | 1281 |
| | | | KG | | | |
| 139111 | NHGMS | 1202 | GIVYSGSTYYAASVKG | 1242 | HGGESDV | 1282 |
| 139100 | NFGIN | 1203 | WINPKNNNTNYAQK | 1243 | GPYYYQSYMDV | 1283 |
| | | | FQG | | | |
| 139101 | SDAMT | 1204 | VISGSGGTTYYADSV | 1244 | LDSSGYYYARGPRY | 1284 |
| | | | KG | | | |
| 139102 | NYGIT | 1205 | WISAYNGNTNYAQK | 1245 | GPYYYYMDV | 1285 |
| | | | FQG | | | |
| 139104 | NHGMS | 1206 | GIVYSGSTYYAASVKG | 1246 | HGGESDV | 1286 |
| 139106 | NHGMS | 1207 | GIVYSGSTYYAASVKG | 1247 | HGGESDV | 1287 |
| 139107 | NHGMS | 1208 | GIVYSGSTYYAASVKG | 1248 | HGGESDV | 1288 |
| 139108 | DYYMS | 1209 | YISSSGSTIYYADSVKG | 1249 | ESGDGMDV | 1289 |
| 139110 | DYYMS | 1210 | YISSSGNTIYYADSVKG | 1250 | STMVREDY | 1290 |
| 139112 | NHGMS | 1211 | GIVYSGSTYYAASVKG | 1251 | HGGESDV | 1291 |
| 139113 | NHGMS | 1212 | GIVYSGSTYYAASVKG | 1252 | HGGESDV | 1292 |
| 139114 | NHGMS | 1213 | GIVYSGSTYYAASVKG | 1253 | HGGESDV | 1293 |
| 149362 | SSYYYWG | 1214 | SIYYSGSAYYNPSLKS | 1254 | HWQEWPDAFDI | 1294 |
| 149363 | TSGMCVS | 1215 | RIDWDEDKFYSTSLKT | 1255 | SGAGGTSATAFDI | 1295 |
| 149364 | SYSMN | 1216 | SISSSSSYIYYADSVKG | 1256 | TIAAVYAFDI | 1296 |
| 149365 | DYYMS | 1217 | YISSSGSTIYYADSVKG | 1257 | DLRGAFDI | 1297 |
| 149366 | SHYIH | 1218 | MINPSGGVTAYSQTL | 1258 | EGSGSGWYFDF | 1298 |
| | | | QG | | | |
| 149367 | SGGYYWS | 1219 | YIYYSGSTYYNPSLKS | 1259 | AGIAARLRGAFDI | 1299 |
| 149368 | SYAIS | 1220 | GIIPIFGTANYAQKFQG | 1260 | RGGYQLLRWDVG | 1300 |
| | | | | | LLRSAFDI | |
| 149369 | SNSAAWN | 1221 | RTYYRSKWYSFYAIS | 1261 | SSPEGLFLYWFDP | 1301 |
| | | | LKS | | | |
| BCMA_EBB- | SYAMS | 1222 | AISGSGGSTYYADSV | 1262 | VEGSGSLDY | 1302 |
| C1978-A4 | | | KG | | | |
| BCMA_EBB- | RYPMS | 1223 | GISDSGVSTYYADSA | 1263 | RAGSEASDI | 1303 |
| C1978-G1 | | | KG | | | |
| BCMA_EBB- | SYAMS | 1224 | AISGSGGSTYYADSV | 1264 | ATYKRELRYYYG | 1304 |
| C1979-C1 | | | KG | | MDV | |
| BCMA_EBB- | SYAMS | 1225 | AISGSGGSTYYADSV | 1265 | ATYKRELRYYYG | 1305 |
| C1978-C7 | | | KG | | MDV | |
| BCMA_EBB- | DYAMH | 1226 | GISWNSGSIGYADSV | 1266 | VGKAVPDV | 1306 |
| C1978-D10 | | | KG | | | |
| BCMA_EBB- | DYAMH | 1227 | SINWKGNSLAYGDSV | 1267 | HQGVAYYNYAM | 1307 |
| C1979-C12 | | | KG | | | DV |
| BCMA_EBB- | SYAMS | 1228 | AISGSGGSTYYADSV | 1268 | VVRDGMDV | 1308 |
| C1980-G4 | | | KG | | | |
| BCMA_EBB- | SYAMS | 1229 | AISGSGGSTYYADSV | 1269 | IPQTGTFDY | 1309 |
| C1980-D2 | | | KG | | | |
| BCMA_EBB- | SYAMS | 1230 | AISGSGGSTYYADSV | 1270 | ANYKRELRYYYG | 1310 |
| C1978-A10 | | | KG | | MDV | |
| BCMA_EBB- | SYAMS | 1231 | AISGSGGSTYYADSV | 1271 | ALVGATGAFDI | 1311 |
| C1978-D4 | | | KG | | | |
| BCMA_EBB- | SYAMS | 1232 | AISGSGGSTYYADSV | 1272 | WFGEGFDP | 1312 |
| C1980-A2 | | | KG | | | |
| BCMA_EBB- | SYAMS | 1233 | AISGSGGSTYYADSV | 1273 | VGYDSSGYYRDY | 1313 |
| C1981-C3 | | | KG | | YGMDV | |
| BCMA_EBB- | SYAMS | 1234 | AISGSGGSTYYADSV | 1274 | MGWSSGYLGAFDI | 1314 |
| C1978-G4 | | | KG | | | |
| A7D12.2 | NFGMN | 1235 | WINTYTGESYFADDF | 1275 | GEIYYGYDGGFAY | 1315 |
| | | | KG | | | |
| C11D5.3 | DYSIN | 1236 | WINIETREPAYAYDF | 1276 | DYSYAMDY | 1316 |
| | | | RG | | | |
| C12A3.2 | HYSMN | 1237 | RINIESGVPIYADDFKG | 1277 | DYLYSLDF | 1317 |
| C13F12.1 | HYSMN | 1238 | RINIETGEPLYADDF | 1278 | DYLYSCDY | 1318 |
| | | | KG | | | |

TABLE 10
Light Chain Variable Domain CDRs according to the Kabat
numbering scheme (Kabat et al. (1991), “Sequences of
Proteins of Immunological Interest,” 5th Ed. Public
Health Service, National Institutes of Health, Bethesda, MD)

| | | SEQ | | SEQ | | SEQ |
|---|---|---|---|---|---|---|
| | | ID | | ID | | ID |
| Candidate | LCDR1 | NO: | LCDR2 | NO: | LCDR3 | NO: |
| 139109 | RASQSISSYLN | 1319 | AASSLQS | 1359 | QQSYSTPYT | 1399 |
| 139103 | RASQSISSSFLA | 1320 | GASRRAT | 1360 | QQYHSSPSWT | 1400 |
| 139105 | RSSQSLLHSNGYNYLD | 1321 | LGSNRAS | 1361 | MQALQTPYT | 1401 |
| 139111 | KSSQSLLRNDGKTPLY | 1322 | EVSNRFS | 1362 | MQNIQFPS | 1402 |
| 139100 | RSSQSLLHSNGYNYLN | 1323 | LGSKRAS | 1363 | MQALQTPYT | 1403 |
| 139101 | RASQSISSYLN | 1324 | GASTLAS | 1364 | QQSYKRAS | 1404 |
| 139102 | RSSQSLLYSNGYNYVD | 1325 | LGSNRAS | 1365 | MQGRQFPYS | 1405 |
| 139104 | RASQSVSSNLA | 1326 | GASTRAS | 1366 | QQYGSSLT | 1406 |
| 139106 | RASQSVSSKLA | 1327 | GASIRAT | 1367 | QQYGSSSWT | 1407 |
| 139107 | RASQSVGSTNLA | 1328 | DASNRAT | 1368 | QQYGSSPPWT | 1408 |
| 139108 | RASQSISSYLN | 1329 | AASSLQS | 1369 | QQSYTLA | 1409 |
| 139110 | KSSESLVHNSGKTYLN | 1330 | EVSNRDS | 1370 | MQGTHWPGT | 1410 |
| 139112 | QASEDINKFLN | 1331 | DASTLQT | 1371 | QQYESLPLT | 1411 |
| 139113 | RASQSVGSNLA | 1332 | GASTRAT | 1372 | QQYNDWLPVT | 1412 |
| 139114 | RASQSIGSSSLA | 1333 | GASSRAS | 1373 | QQYAGSPPFT | 1413 |
| 149362 | KASQDIDDAMN | 1334 | SATSPVP | 1374 | LQHDNFPLT | 1414 |
| 149363 | RASQDIYNNLA | 1335 | AANKSQS | 1375 | QHYYRFPYS | 1415 |
| 149364 | RSSQSLLHSNGYNYLD | 1336 | LGSNRAS | 1376 | MQALQTPYT | 1416 |
| 149365 | GGNNIGTKSVH | 1337 | DDSVRPS | 1377 | QVWDSDSEHVV | 1417 |
| 149366 | SGDGLSKKYVS | 1338 | RDKERPS | 1378 | QAWDDTTVV | 1418 |
| 149367 | RASQGIRNWLA | 1339 | AASNLQS | 1379 | QKYNSAPFT | 1419 |
| 149368 | GGNNIGSKSVH | 1340 | GKNNRPS | 1380 | SSRDSSGDHLRV | 1420 |
| 149369 | QGDSLGNYYAT | 1341 | GTNNRPS | 1381 | NSRDSSGHHLL | 1421 |
| BCMA_EBB- | RASQSVSSAYLA | 1342 | GASTRAT | 1382 | QHYGSSFNGSS | 1422 |
| C1978- | | | | | LFT | |
| A4 | | | | | | |
| BCMA_EBB- | RASQSVSNSLA | 1343 | DASSRAT | 1383 | QQFGTSSGLT | 1423 |
| C1978- | | | | | | |
| G1 | | | | | | |
| BCMA_EBB- | RASQSVSSSFLA | 1344 | GASSRAT | 1384 | QQYHSSPSWT | 1424 |
| C1979- | | | | | | |
| C1 | | | | | | |
| BCMA_EBB- | RASQSVSTTFLA | 1345 | GSSNRAT | 1385 | QQYHSSPSWT | 1425 |
| C1978- | | | | | | |
| C7 | | | | | | |
| BCMA_EBB- | RASQSISSYLN | 1346 | AASSLQS | 1386 | QQSYSTPYS | 1426 |
| C1978- | | | | | | |
| D10 | | | | | | |
| BCMA_EBB- | RATQSIGSSFLA | 1347 | GASQRAT | 1387 | QHYESSPSWT | 1427 |
| C1979- | | | | | | |
| C12 | | | | | | |
| BCMA_EBB- | RASQSVSSSYLA | 1348 | GASSRAT | 1388 | QQYGSPPRFT | 1428 |
| C1980- | | | | | | |
| G4 | | | | | | |
| BCMA_EBB- | RASQSVSSSYLA | 1349 | GASSRAT | 1389 | QHYGSSPSWT | 1429 |
| C1980- | | | | | | |
| D2 | | | | | | |
| BCMA_EBB- | RASQRVASNYLA | 1350 | GASSRAT | 1390 | QHYDSSPSWT | 1430 |
| C1978- | | | | | | |
| A10 | | | | | | |
| BCMA_EBB- | RASQSLSSNFLA | 1351 | GASNWAT | 1391 | QYYGTSPMYT | 1431 |
| C1978- | | | | | | |
| D4 | | | | | | |
| BCMA_EBB- | RSSQSLLHSNGYNYLD | 1352 | LGSNRAS | 1392 | MQALQTPLT | 1432 |
| C1980- | | | | | | |
| A2 | | | | | | |
| BCMA_EBB- | RASQSVSSSYLA | 1353 | GTSSRAT | 1393 | QHYGNSPPKFT | 1433 |
| C1981- | | | | | | |
| C3 | | | | | | |
| BCMA_EBB- | RASQSVASSFLA | 1354 | GASGRAT | 1394 | QHYGGSPRLT | 1434 |
| C1978- | | | | | | |
| G4 | | | | | | |
| A7D12.2 | RASQDVNTAVS | 1355 | SASYRYT | 1395 | QQHYSTPWT | 1435 |
| C11D5.3 | RASESVSVIGAHLIH | 1356 | LASNLET | 1396 | LQSRIFPRT | 1436 |
| C12A3.2 | RASESVTILGSHLIY | 1357 | LASNVQT | 1397 | LQSRTIPRT | 1437 |
| C13F12.1 | RASESVTILGSHLIY | 1358 | LASNVQT | 1398 | LQSRTIPRT | 1438 |

TABLE 11
Heavy Chain Variable Domain CDRs according to the
Chothia numbering scheme (A1-Lazikani et al., (1997)
JMB 273, 927-948)

| | | SEQ | | SEQ | | SEQ |
|---|---|---|---|---|---|---|
| | | ID | | ID | | ID |
| Candidate | HCDR1 | NO: | HCDR2 | NO: | HCDR3 | NO: |
| 139109 | GFALSNH | 1439 | VYSGS | 1479 | HGGESDV | 1519 |
| 139103 | GFTFSNY | 1440 | SRSGEN | 1480 | SPAHYYGGMDV | 1520 |
| 139105 | GFTFDDY | 1441 | SWNSGS | 1481 | HSFLAY | 1521 |
| 139111 | GFALSNH | 1442 | VYSGS | 1482 | HGGESDV | 1522 |
| 139100 | GYIFDNF | 1443 | NPKNNN | 1483 | GPYYYQSYMDV | 1523 |
| 139101 | GFTFSSD | 1444 | SGSGGT | 1484 | LDSSGYYYARGPRY | 1524 |
| 139102 | GYTFSNY | 1445 | SAYNGN | 1485 | GPYYYYMDV | 1525 |
| 139104 | GFALSNH | 1446 | VYSGS | 1486 | HGGESDV | 1526 |
| 139106 | GFALSNH | 1447 | VYSGS | 1487 | HGGESDV | 1527 |
| 139107 | GFALSNH | 1448 | VYSGS | 1488 | HGGESDV | 1528 |
| 139108 | GFTFSDY | 1449 | SSSGST | 1489 | ESGDGMDV | 1529 |
| 139110 | GFTFSDY | 1450 | SSSGNT | 1490 | STMVREDY | 1530 |
| 139112 | GFALSNH | 1451 | VYSGS | 1491 | HGGESDV | 1531 |
| 139113 | GFALSNH | 1452 | VYSGS | 1492 | HGGESDV | 1532 |
| 139114 | GFALSNH | 1453 | VYSGS | 1493 | HGGESDV | 1533 |
| 149362 | GGSISSSYY | 1454 | YYSGS | 1494 | HWQEWPDAFDI | 1534 |
| 149363 | GFSLRTSGM | 1455 | DWDED | 1495 | SGAGGTSATAFDI | 1535 |
| 149364 | GFTFSSY | 1456 | SSSSSY | 1496 | TIAAVYAFDI | 1536 |
| 149365 | GFTFSDY | 1457 | SSSGST | 1497 | DLRGAFDI | 1537 |
| 149366 | GYTVTSH | 1458 | NPSGGV | 1498 | EGSGSGWYFDF | 1538 |
| 149367 | GGSISSGGY | 1459 | YYSGS | 1499 | AGIAARLRGAFDI | 1539 |
| 149368 | GGTFSSY | 1460 | IPIFGT | 1500 | RGGYQLLRWDVGLL | 1540 |
| | | | | | RSAFDI | |
| 149369 | GDSVSSNSA | 1461 | YYRSKWY | 1501 | SSPEGLFLYWFDP | 1541 |
| BCMA_EBB- | GFTFSSY | 1462 | SGSGGS | 1502 | VEGSGSLDY | 1542 |
| C1978-A4 | | | | | | |
| BCMA_EBB- | GITFSRY | 1463 | SDSGVS | 1503 | RAGSEASDI | 1543 |
| C1978-G1 | | | | | | |
| BCMA_EBB- | GFTFSSY | 1464 | SGSGGS | 1504 | ATYKRELRYYYGMDV | 1544 |
| C1979-C1 | | | | | | |
| BCMA_EBB- | GFTFSSY | 1465 | SGSGGS | 1505 | ATYKRELRYYYGMDV | 1545 |
| C1978-C7 | | | | | | |
| BCMA_EBB- | GFTFDDY | 1466 | SWNSGS | 1506 | VGKAVPDV | 1546 |
| C1978-D10 | | | | | | |
| BCMA_EBB- | GFTFDDY | 1467 | NWKGNS | 1507 | HQGVAYYNYAMDV | 1547 |
| C1979-C12 | | | | | | |
| BCMA_EBB- | GFTFSSY | 1468 | SGSGGS | 1508 | VVRDGMDV | 1548 |
| C1980-G4 | | | | | | |
| BCMA_EBB- | GFTFSSY | 1469 | SGSGGS | 1509 | IPQTGTFDY | 1549 |
| C1980-D2 | | | | | | |
| BCMA_EBB- | GFTFSSY | 1470 | SGSGGS | 1510 | ANYKRELRYYYGMDV | 1550 |
| C1978-A10 | | | | | | |
| BCMA_EBB- | GFSFSSY | 1471 | SGSGGS | 1511 | ALVGATGAFDI | 1551 |
| C1978-D4 | | | | | | |
| BCMA_EBB- | GFTFSSY | 1472 | SGSGGS | 1512 | WFGEGFDP | 1552 |
| C1980-A2 | | | | | | |
| BCMA_EBB- | GFTFSSY | 1473 | SGSGGS | 1513 | VGYDSSGYYRDYYG | 1553 |
| C1981-C3 | | | | | MDV | |
| BCMA_EBB- | GFTFSSY | 1474 | SGSGGS | 1514 | MGWSSGYLGAFDI | 1554 |
| C1978-G4 | | | | | | |
| A7D12.2 | GYTFTNF | 1475 | NTYTGE | 1515 | GEIYYGYDGGFAY | 1555 |
| C11D5.3 | GYTFTDY | 1476 | NTETRE | 1516 | DYSYAMDY | 1556 |
| C12A3.2 | GYTFRHY | 1477 | NTESGV | 1517 | DYLYSLDF | 1557 |
| C13F12.1 | GYTFTHY | 1478 | NTETGE | 1518 | DYLYSCDY | 1558 |

TABLE 12
Light Chain Variable Domain CDRs according to the
Chothia numbering scheme (A1-Lazikani et al., (1997)
JMB 273, 927-948)

| | | SEQ ID | | SEQ ID | | SEQ ID |
|---|---|---|---|---|---|---|
| Candidate | LCDR1 | NO: | LCDR2 | NO: | LCDR3 | NO: |
| 139109 | SQSISSY | 1559 | AAS | 1599 | SYSTPY | 1639 |
| 139103 | SQSISSSF | 1560 | GAS | 1600 | YHSSPSW | 1640 |
| 139105 | SQSLLHSNGYNY | 1561 | LGS | 1601 | ALQTPY | 1641 |
| 139111 | SQSLLRNDGKTP | 1562 | EVS | 1602 | NIQFP | 1642 |
| 139100 | SQSLLHSNGYNY | 1563 | LGS | 1603 | ALQTPY | 1643 |
| 139101 | SQSISSY | 1564 | GAS | 1604 | SYKRA | 1644 |
| 139102 | SQSLLYSNGYNY | 1565 | LGS | 1605 | GRQFPY | 1645 |
| 139104 | SQSVSSN | 1566 | GAS | 1606 | YGSSL | 1646 |
| 139106 | SQSVSSK | 1567 | GAS | 1607 | YGSSSW | 1647 |
| 139107 | SQSVGSTN | 1568 | DAS | 1608 | YGSSPPW | 1648 |
| 139108 | SQSISSY | 1569 | AAS | 1609 | SYTL | 1649 |
| 139110 | SESLVHNSGKTY | 1570 | EVS | 1610 | GTHWPG | 1650 |
| 139112 | SEDINKF | 1571 | DAS | 1611 | YESLPL | 1651 |
| 139113 | SQSVGSN | 1572 | GAS | 1612 | YNDWLPV | 1652 |
| 139114 | SQSIGSSS | 1573 | GAS | 1613 | YAGSPPF | 1653 |
| 149362 | SQDIDDA | 1574 | SAT | 1614 | HDNFPL | 1654 |
| 149363 | SQDIYNN | 1575 | AAN | 1615 | YYRFPY | 1655 |
| 149364 | SQSLLHSNGYNY | 1576 | LGS | 1616 | ALQTPY | 1656 |
| 149365 | NNIGTKS | 1577 | DDS | 1617 | WDSDSEHV | 1657 |
| 149366 | DGLSKKY | 1578 | RDK | 1618 | WDDTTV | 1658 |
| 149367 | SQGIRNW | 1579 | AAS | 1619 | YNSAPF | 1659 |
| 149368 | NNIGSKS | 1580 | GKN | 1620 | RDSSGDHLR | 1660 |
| 149369 | DSLGNYY | 1581 | GTN | 1621 | RDSSGHHL | 1661 |
| BCMA_EBB- | SQSVSSAY | 1582 | GAS | 1622 | YGSSFNGSSLF | 1662 |
| C1978-A4 | | | | | | |
| BCMA_EBB- | SQSVSNS | 1583 | DAS | 1623 | FGTSSGL | 1663 |
| C1978-G1 | | | | | | |
| BCMA_EBB- | SQSVSSSF | 1584 | GAS | 1624 | YHSSPSW | 1664 |
| C1979-C1 | | | | | | |
| BCMA_EBB- | SQSVSTTF | 1585 | GSS | 1625 | YHSSPSW | 1665 |
| C1978-C7 | | | | | | |
| BCMA_EBB- | SQSISSY | 1586 | AAS | 1626 | SYSTPY | 1666 |
| C1978-D10 | | | | | | |
| BCMA_EBB- | TQSIGSSF | 1587 | GAS | 1627 | YESSPSW | 1667 |
| C1979-C12 | | | | | | |
| BCMA_EBB- | SQSVSSSY | 1588 | GAS | 1628 | YGSPPRF | 1668 |
| C1980-G4 | | | | | | |
| BCMA_EBB- | SQSVSSSY | 1589 | GAS | 1629 | YGSSPSW | 1669 |
| C1980-D2 | | | | | | |
| BCMA_EBB- | SQRVASNY | 1590 | GAS | 1630 | YDSSPSW | 1670 |
| C1978-A10 | | | | | | |
| BCMA_EBB- | SQSLSSNF | 1591 | GAS | 1631 | YGTSPMY | 1671 |
| C1978-D4 | | | | | | |
| BCMA_EBB- | SQSLLHSNGYNY | 1592 | LGS | 1632 | ALQTPL | 1672 |
| C1980-A2 | | | | | | |
| BCMA_EBB- | SQSVSSSY | 1593 | GTS | 1633 | YGNSPPKF | 1673 |
| C1981-C3 | | | | | | |
| BCMA_EBB- | SQSVASSF | 1594 | GAS | 1634 | YGGSPRL | 1674 |
| C1978-G4 | | | | | | |
| A7D12.2 | SQDVNTA | 1595 | SAS | 1635 | HYSTPW | 1675 |
| C11D5.3 | SESVSVIGAHL | 1596 | LAS | 1636 | SRIFPR | 1676 |
| C12A3.2 | SESVTILGSHL | 1597 | LAS | 1637 | SRTIPR | 1677 |
| C13F12.1 | SESVTILGSHL | 1598 | LAS | 1638 | SRTIPR | 1678 |

TABLE 13
Heavy Chain Variable Domain CDRs according to a combination
of the Kabat numbering scheme (Kabat et al. (1991), “Sequences
of Proteins of Immunological Interest,” 5th Ed. Public Health
Service, National Institutes of Health, Bethesda, MD) and the
Chothia numbering scheme (A1-Lazikani et al., (1997) JMB
273, 927-948).

| | | SEQ | | SEQ | | SEQ |
|---|---|---|---|---|---|---|
| | | ID | | ID | | ID |
| Candidate | HCDR1 | NO: | HCDR2 | NO: | HCDR3 | NO: |
| 139109 | GFALSNHGMS | 1679 | GIVYSGSTYYAAS | 1719 | HGGESDV | 1759 |
| | | | VKG | | | |
| 139103 | GFTFSNYAMS | 1680 | GISRSGENTYYAD | 1720 | SPAHYYGGMDV | 1760 |
| | | | SVKG | | | |
| 139105 | GFTFDDYAMH | 1681 | GISWNSGSIGYAD | 1721 | HSFLAY | 1761 |
| | | | SVKG | | | |
| 139111 | GFALSNHGMS | 1682 | GIVYSGSTYYAAS | 1722 | HGGESDV | 1762 |
| | | | VKG | | | |
| 139100 | GYIFDNFGIN | 1683 | WINPKNNNTNYA | 1723 | GPYYYQSYMDV | 1763 |
| | | | QKFQG | | | |
| 139101 | GFTFSSDAMT | 1684 | VISGSGGTTYYAD | 1724 | LDSSGYYYAR | 1764 |
| | | | SVKG | | GPRY | |
| 139102 | GYTFSNYGIT | 1685 | WISAYNGNTNYA | 1725 | GPYYYYMDV | 1765 |
| | | | QKFQG | | | |
| 139104 | GFALSNHGMS | 1686 | GIVYSGSTYYAAS | 1726 | HGGESDV | 1766 |
| | | | VKG | | | |
| 139106 | GFALSNHGMS | 1687 | GIVYSGSTYYAAS | 1727 | HGGESDV | 1767 |
| | | | VKG | | | |
| 139107 | GFALSNHGMS | 1688 | GIVYSGSTYYAAS | 1728 | HGGESDV | 1768 |
| | | | VKG | | | |
| 139108 | GFTFSDYYMS | 1689 | YISSSGSTIYYADS | 1729 | ESGDGMDV | 1769 |
| | | | VKG | | | |
| 139110 | GFTFSDYYMS | 1690 | YISSSGNTIYYAD | 1730 | STMVREDY | 1770 |
| | | | SVKG | | | |
| 139112 | GFALSNHGMS | 1691 | GIVYSGSTYYAAS | 1731 | HGGESDV | 1771 |
| | | | VKG | | | |
| 139113 | GFALSNHGMS | 1692 | GIVYSGSTYYAAS | 1732 | HGGESDV | 1772 |
| | | | VKG | | | |
| 139114 | GFALSNHGMS | 1693 | GIVYSGSTYYAAS | 1733 | HGGESDV | 1773 |
| | | | VKG | | | |
| 149362 | GGSISSSYYYWG | 1694 | SIYYSGSAYYNPS | 1734 | HWQEWPDAFDI | 1774 |
| | | | LKS | | | |
| 149363 | GFSLRTSGMC | 1695 | RIDWDEDKFYSTS | 1735 | SGAGGTSATAF | 1775 |
| | VS | | LKT | | DI | |
| 149364 | GFTFSSYSMN | 1696 | SISSSSSYIYYADS | 1736 | TIAAVYAFDI | 1776 |
| | | | VKG | | | |
| 149365 | GFTFSDYYMS | 1697 | YISSSGSTIYYADS | 1737 | DLRGAFDI | 1777 |
| | | | VKG | | | |
| 149366 | GYTVTSHYIH | 1698 | MINPSGGVTAYS | 1738 | EGSGSGWYFDF | 1778 |
| | | | QTLQG | | | |
| 149367 | GGSISSGGYY | 1699 | YIYYSGSTYYNPS | 1739 | AGIAARLRGAF | 1779 |
| | WS | | LKS | | DI | |
| 149368 | GGTFSSYAIS | 1700 | GIIPIFGTANYAQ | 1740 | RGGYQLLRWD | 1780 |
| | | | KFQG | | VGLLRSAFDI | |
| 149369 | GDSVSSNSAA | 1701 | RTYYRSKWYSFY | 1741 | SSPEGLFLYWF | 1781 |
| | WN | | AISLKS | | DP | |
| BCMA_EBB- | GFTFSSYAMS | 1702 | AISGSGGSTYYAD | 1742 | VEGSGSLDY | 1782 |
| C1978-A4 | | | SVKG | | | |
| BCMA_EBB- | GITFSRYPMS | 1703 | GISDSGVSTYYAD | 1743 | RAGSEASDI | 1783 |
| C1978-G1 | | | SAKG | | | |
| BCMA_EBB- | GFTFSSYAMS | 1704 | AISGSGGSTYYAD | 1744 | ATYKRELRYY | 1784 |
| C1979-C1 | | | SVKG | | YGMDV | |
| BCMA_EBB- | GFTFSSYAMS | 1705 | AISGSGGSTYYAD | 1745 | ATYKRELRYY | 1785 |
| C1978-C7 | | | SVKG | | YGMDV | |
| BCMA_EBB- | GFTFDDYAMH | 1706 | GISWNSGSIGYAD | 1746 | VGKAVPDV | 1786 |
| C1978-D10 | | | SVKG | | | |
| BCMA_EBB- | GFTFDDYAMH | 1707 | SINWKGNSLAYG | 1747 | HQGVAYYNYA | 1787 |
| C1979-C12 | | | DSVKG | | MDV | |
| BCMA_EBB- | GFTFSSYAMS | 1708 | AISGSGGSTYYAD | 1748 | VVRDGMDV | 1788 |
| C1980-G4 | | | SVKG | | | |
| BCMA_EBB- | GFTFSSYAMS | 1709 | AISGSGGSTYYAD | 1749 | IPQTGTFDY | 1789 |
| C1980-D2 | | | SVKG | | | |
| BCMA_EBB- | GFTFSSYAMS | 1710 | AISGSGGSTYYAD | 1750 | ANYKRELRYY | 1790 |
| C1978-A10 | | | SVKG | | YGMDV | |
| BCMA_EBB- | GFSFSSYAMS | 1711 | AISGSGGSTYYAD | 1751 | ALVGATGAFDI | 1791 |
| C1978-D4 | | | SVKG | | | |
| BCMA_EBB- | GFTFSSYAMS | 1712 | AISGSGGSTYYAD | 1752 | WFGEGFDP | 1792 |
| C1980-A2 | | | SVKG | | | |
| BCMA_EBB- | GFTFSSYAMS | 1713 | AISGSGGSTYYAD | 1753 | VGYDSSGYYR | 1793 |
| C1981-C3 | | | SVKG | | DYYGMDV | |
| BCMA_EBB- | GFTFSSYAMS | 1714 | AISGSGGSTYYAD | 1754 | MGWSSGYLGA | 1794 |
| C1978-G4 | | | SVKG | | FDI | |
| A7D12.2 | GYTFTNFGMN | 1715 | WINTYTGESYFA | 1755 | GEIYYGYDGGF | 1795 |
| | | | DDFKG | | AY | |
| C11D5.3 | GYTFTDYSIN | 1716 | WINTETREPAYA | 1756 | DYSYAMDY | 1796 |
| | | | YDFRG | | | |
| C12A3.2 | GYTFRHYSMN | 1717 | RINTESGVPIYAD | 1757 | DYLYSLDF | 1797 |
| | | | DFKG | | | |
| C13F12.1 | GYTFTHYSMN | 1718 | RINTETGEPLYAD | 1758 | DYLYSCDY | 1798 |
| | | | DFKG | | | |

TABLE 14
Light Chain Variable Domain CDRs according to a combination
of the Kabat numbering scheme (Kabat et al. (1991),
“Sequences of Proteins of Immunological Interest,”
5th Ed. Public Health Service, National Institutes of
Health, Bethesda, MD) and the Chothia numbering scheme
(A1-Lazikani et al., (1997) JMB 273, 927-948).

| | | SEQ | | SEQ | | SEQ |
|---|---|---|---|---|---|---|
| | | ID | | ID | | ID |
| Candidate | LCDR1 | NO: | LCDR2 | NO: | LCDR3 | NO: |
| 139109 | RASQSISSYLN | 1799 | AASSLQS | 1839 | QQSYSTPYT | 1879 |
| 139103 | RASQSISSSFLA | 1800 | GASRRAT | 1840 | QQYHSSPSWT | 1880 |
| 139105 | RSSQSLLHSNGYNYLD | 1801 | LGSNRAS | 1841 | MQALQTPYT | 1881 |
| 139111 | KSSQSLLRNDGKTPLY | 1802 | EVSNRFS | 1842 | MQNIQFPS | 1882 |
| 139100 | RSSQSLLHSNGYNYLN | 1803 | LGSKRAS | 1843 | MQALQTPYT | 1883 |
| 139101 | RASQSISSYLN | 1804 | GASTLAS | 1844 | QQSYKRAS | 1884 |
| 139102 | RSSQSLLYSNGYNYVD | 1805 | LGSNRAS | 1845 | MQGRQFPYS | 1885 |
| 139104 | RASQSVSSNLA | 1806 | GASTRAS | 1846 | QQYGSSLT | 1886 |
| 139106 | RASQSVSSKLA | 1807 | GASIRAT | 1847 | QQYGSSSWT | 1887 |
| 139107 | RASQSVGSTNLA | 1808 | DASNRAT | 1848 | QQYGSSPPWT | 1888 |
| 139108 | RASQSISSYLN | 1809 | AASSLQS | 1849 | QQSYTLA | 1889 |
| 139110 | KSSESLVHNSGKTYLN | 1810 | EVSNRDS | 1850 | MQGTHWPGT | 1890 |
| 139112 | QASEDINKFLN | 1811 | DASTLQT | 1851 | QQYESLPLT | 1891 |
| 139113 | RASQSVGSNLA | 1812 | GASTRAT | 1852 | QQYNDWLPVT | 1892 |
| 139114 | RASQSIGSSSLA | 1813 | GASSRAS | 1853 | QQYAGSPPFT | 1893 |
| 149362 | KASQDIDDAMN | 1814 | SATSPVP | 1854 | LQHDNFPLT | 1894 |
| 149363 | RASQDIYNNLA | 1815 | AANKSQS | 1855 | QHYYRFPYS | 1895 |
| 149364 | RSSQSLLHSNGYNYLD | 1816 | LGSNRAS | 1856 | MQALQTPYT | 1896 |
| 149365 | GGNNIGTKSVH | 1817 | DDSVRPS | 1857 | QVWDSDSEHVV | 1897 |
| 149366 | SGDGLSKKYVS | 1818 | RDKERPS | 1858 | QAWDDTTVV | 1898 |
| 149367 | RASQGIRNWLA | 1819 | AASNLQS | 1859 | QKYNSAPFT | 1899 |
| 149368 | GGNNIGSKSVH | 1820 | GKNNRPS | 1860 | SSRDSSGDHL | 1900 |
| | | | | | RV | |
| 149369 | QGDSLGNYYAT | 1821 | GTNNRPS | 1861 | NSRDSSGHHLL | 1901 |
| BCMA_EBB- | RASQSVSSAYLA | 1822 | GASTRAT | 1862 | QHYGSSFNGS | 1902 |
| C1978-A4 | | | | | SLFT | |
| BCMA_EBB- | RASQSVSNSLA | 1823 | DASSRAT | 1863 | QQFGTSSGLT | 1903 |
| C1978-G1 | | | | | | |
| BCMA_EBB- | RASQSVSSSFLA | 1824 | GASSRAT | 1864 | QQYHSSPSWT | 1904 |
| C1979-C1 | | | | | | |
| BCMA_EBB- | RASQSVSTTFLA | 1825 | GSSNRAT | 1865 | QQYHSSPSWT | 1905 |
| C1978-C7 | | | | | | |
| BCMA_EBB- | RASQSISSYLN | 1826 | AASSLQS | 1866 | QQSYSTPYS | 1906 |
| C1978-D10 | | | | | | |
| BCMA_EBB- | RATQSIGSSFLA | 1827 | GASQRAT | 1867 | QHYESSPSWT | 1907 |
| C1979-C12 | | | | | | |
| BCMA_EBB- | RASQSVSSSYLA | 1828 | GASSRAT | 1868 | QQYGSPPRFT | 1908 |
| C1980-G4 | | | | | | |
| BCMA_EBB- | RASQSVSSSYLA | 1829 | GASSRAT | 1869 | QHYGSSPSWT | 1909 |
| C1980-D2 | | | | | | |
| BCMA_EBB- | RASQRVASNYLA | 1830 | GASSRAT | 1870 | QHYDSSPSWT | 1910 |
| C1978-A10 | | | | | | |
| BCMA_EBB- | RASQSLSSNFLA | 1831 | GASNWAT | 1871 | QYYGTSPMYT | 1911 |
| C1978-D4 | | | | | | |
| BCMA_EBB- | RSSQSLLHSNGYNYLD | 1832 | LGSNRAS | 1872 | MQALQTPLT | 1912 |
| C1980-A2 | | | | | | |
| BCMA_EBB- | RASQSVSSSYLA | 1833 | GTSSRAT | 1873 | QHYGNSPPKFT | 1913 |
| C1981-C3 | | | | | | |
| BCMA_EBB- | RASQSVASSFLA | 1834 | GASGRAT | 1874 | QHYGGSPRLT | 1914 |
| C1978-G4 | | | | | | |
| A7D12.2 | RASQDVNTAVS | 1835 | SASYRYT | 1875 | QQHYSTPWT | 1915 |
| C11D5.3 | RASESVSVIGAHLIH | 1836 | LASNLET | 1876 | LQSRIFPRT | 1916 |
| C12A3.2 | RASESVTILGSHLIY | 1837 | LASNVQT | 1877 | LQSRTIPRT | 1917 |
| C13F12.1 | RASESVTILGSHLIY | 1838 | LASNVQT | 1878 | LQSRTIPRT | 1918 |

[0720] In certain embodiments, the CAR molecule described herein (e.g., the CAR nucleic acid or the CAR polypeptide) or a BCMA binding domain includes:

(1) one, two, or three light chain (LC) CDRs chosen from one of the following:

[0721] (i) a LC CDR1 of SEQ ID NO: 1320, LC CDR2 of SEQ ID NO: 1360 and LC CDR3 of SEQ ID NO: 1400 of BCMA-4 CAR (139103);

[0722] (ii) a LC CDR1 of SEQ ID NO: 1319, LC CDR2 of SEQ ID NO: 1359 and LC CDR3 of SEQ ID NO: 1399 of BCMA-10 CAR (139109);

[0723] (iii) a LC CDR1 of SEQ ID NO: 1331, LC CDR2 of SEQ ID NO: 137 land LC CDR3 of SEQ ID NO: 1411of BCMA-13 CAR (139112); or

[0724] (iv) a LC CDR1 of SEQ ID NO: 1333, LC CDR2 of SEQ ID NO: 1373 and LC CDR3 of SEQ ID NO: 1413 of BCMA-15 CAR (139114), and/or

(2) one, two, or three heavy chain (HC) CDRs from one of the following:

[0725] (i) a HC CDR1 of SEQ ID NO: 1200, HC CDR2 of SEQ ID NO: 1240 and HC CDR3 of SEQ ID NO: 1280 of BCMA-4 CAR (139103);

[0726] (ii) a HC CDR1 of SEQ ID NO: 1199, HC CDR2 of SEQ ID NO: 1239 and HC CDR3 of SEQ ID NO: 1279 of BCMA-10 CAR (139109);

[0727] (iii) a HC CDR1 of SEQ ID NO: 1121, HC CDR2 of SEQ ID NO: 1251 and HC CDR3 of SEQ ID NO: 1291 of BCMA-13 CAR (139112); or

[0728] (iv) a HC CDR1 of SEQ ID NO: 1213, HC CDR2 of SEQ ID NO: 1253 and HC CDR3 of SEQ ID NO: 1293 of BCMA-15 (139114).

[0729] In certain embodiments, the CAR molecule described herein (e.g., the CAR nucleic acid or the CAR polypeptide) includes:

[0730] (1) one, two, or three light chain (LC) CDRs chosen from one of the following:

[0731] (i) a LC CDR1 of SEQ ID NO: 1560, LC CDR2 of SEQ ID NO: 1600 and LC CDR3 of SEQ ID NO: 1640 of BCMA-4 CAR (139103);

[0732] (ii) a LC CDR1 of SEQ ID NO: 1559, LC CDR2 of SEQ ID NO: 1599 and LC CDR3 of SEQ ID NO: 1639 of BCMA-10 CAR (139109);

[0733] (iii) a LC CDR1 of SEQ ID NO: 1571, LC CDR2 of SEQ ID NO: 1611 and LC CDR3 of SEQ ID NO: 1651 of BCMA-13 CAR (139112); or

[0734] (iv) a LC CDR1 of SEQ ID NO: 1573, LC CDR2 of SEQ ID NO: 1613 and LC CDR3 of SEQ ID NO: 1653 of BCMA-15 CAR (139114); and/or

(2) one, two, or three heavy chain (HC) CDRs chosen from one of the following:

[0735] (i) a HC CDR1 of SEQ ID NO: 1440, HC CDR2 of SEQ ID NO: 1480 and HC CDR3 of SEQ ID NO: 1520 of BCMA-4 CAR (139103);

[0736] (ii) a HC CDR1 of SEQ ID NO: 1439, HC CDR2 of SEQ ID NO: 1479 and HC CDR3 of SEQ ID NO: 1519 of BCMA-10 CAR (139109);

[0737] (iii) a HC CDR1 of SEQ ID NO: 1451, HC CDR2 of SEQ ID NO: 1491 and HC CDR3 of SEQ ID NO: 1531 of BCMA-13 CAR (139112); or

[0738] (iv) a HC CDR1 of SEQ ID NO: 1453, HC CDR2 of SEQ ID NO: 1493 and HC CDR3 of SEQ ID NO: 1533 of BCMA-15 CAR (139114).

[0739] In certain embodiments, the CAR molecule described herein (e.g., the CAR nucleic acid or the CAR polypeptide) includes:

(1) one, two, or three light chain (LC) CDRs chosen from one of the following:

[0740] (i) a LC CDR1 of SEQ ID NO: 1800 LC CDR2 of SEQ ID NO: 1840 and LC CDR3 of SEQ ID NO: 1880 of BCMA-4 CAR (139103);

[0741] (ii) a LC CDR1 of SEQ ID NO: 1799, LC CDR2 of SEQ ID NO: 1839 and LC CDR3 of SEQ ID NO: 1879 of BCMA-10 CAR (139109);

[0742] (iii) a LC CDR1 of SEQ ID NO: 1811, LC CDR2 of SEQ ID NO: 1851 and LC CDR3 of SEQ ID NO: 1891 of BCMA-13 CAR (139112); or

[0743] (iv) a LC CDR1 of SEQ ID NO: 1813, LC CDR2 of SEQ ID NO: 1853 and LC CDR3 of SEQ ID NO: 1893 of BCMA-15 CAR (139114); and/or

(2) one, two, or three heavy chain (HC) CDRs chosen from one of the following:

[0744] (i) a HC CDR1 of SEQ ID NO: 1680, HC CDR2 of SEQ ID NO: 1720 and HC CDR3 of SEQ ID NO: 1760 of BCMA-4 CAR (139103);

[0745] (ii) a HC CDR1 of SEQ ID NO: 1679, HC CDR2 of SEQ ID NO: 1719 and HC CDR3 of SEQ ID NO: 1759 of BCMA-10 CAR (139109);

[0746] (iii) a HC CDR1 of SEQ ID NO: 1691, HC CDR2 of SEQ ID NO: 1731 and HC CDR3 of SEQ ID NO: 1771 of BCMA-13 CAR (139112);

[0747] (iv) a HC CDR1 of SEQ ID NO: 1693, HC CDR2 of SEQ ID NO: 1733 and HC CDR3 of SEQ ID NO: 1773 of BCMA-15 CAR (139114).

### Exemplary Components of the CAR Molecules:

Leader (amino acid sequence) (SEQ ID NO: 1919)
MALPVTALLLPLALLLHAARP
leader (nucleic acid sequence) (SEQ ID NO: 1920)
ATGGCCCTGCCTGTGACAGCCCTGCTGCTGCCTCTGGCTCTGCTGCTGC
ATGCCGCTAGACCC
leader (nucleic acid sequence) (SEQ ID NO: 1942)
ATGGCCCTCCCTGTCACCGCCCTGCTGCTTCCGCTGGCTCTTCTGCTCC
ACGCCGCTCGGCCC
CD8 hinge (amino acid sequence) (SEQ ID NO: 1921)
TTTPAPRPPTPAPTIASQPLSLRPEACRPAAGGAVHTRGLDFACD
CD8 hinge (nucleic acid sequence)
(SEQ ID NO: 1922)
ACCACGACGCCAGCGCCGCGACCACCAACACCGGCGCCCACCATCGCGT
CGCAGCCCCTGTCCCTGCGCCCAGAGGCGTGCCGGCCAGCGGCGGGGGG
CGCAGTGCACACGAGGGGGCTGGACTTCGCCTGTGAT
CD8 transmembrane (amino acid sequence)
(SEQ ID NO: 1923)
IYIWAPLAGTCGVLLLSLVITLYC
CD8 transmembrane (nucleic acid sequence)
(SEQ ID NO: 1924)
ATCTACATCTGGGCGCCCTTGGCCGGGACTTGTGGGGTCCTTCTCCTGT
CACTGGTTATCACCCTTTACTGC
CD8 transmembrane (nucleic acid sequence)
(SEQ ID NO: 1943)
ATCTACATTTGGGCCCCTCTGGCTGGTACTTGCGGGGTCCTGCTGCTTT
CACTCGTGATCACTCTTTACTGT
4-1BB Intracellular domain (amino acid sequence)
(SEQ ID NO: 1925)
KRGRKKLLYIFKQPFMRPVQTTQEEDGCSCRFPEEEEGGCEL
4-1BB Intracellular domain (nucleic acid sequence)
(SEQ ID NO: 1926)
AAACGGGGCAGAAAGAAACTCCTGTATATATTCAAACAACCATTTATGA
GACCAGTACAAACTACTCAAGAGGAAGATGGCTGTAGCTGCCGATTTCC
AGAAGAAGAAGAAGGAGGATGTGAACTG
4-1BB Intracellular domain (nucleic acid sequence)
(SEQ ID NO: 1944)
AAGCGCGGTCGGAAGAAGCTGCTGTACATCTTTAAGCAACCCTTCATGA
GGCCTGTGCAGACTACTCAAGAGGAGGACGGCTGTTCATGCCGGTTCCC
AGAGGAGGAGGAAGGCGGCTGCGAACTG
CD28 Intracellular domain (amino acid sequence)
(SEQ ID NO: 1927)

(SEQ ID NO: 1927)

RSKRSRLLHSDYMNMTPRRPGPTRKHYQPYAPPRDFAAYRS
CD28 Intracellular domain (nucleotide sequence)
(SEQ ID NO: 1928)

(SEQ ID NO: 1928)

AGGAGTAAGAGGAGCAGGCTCCTGCACAGTGACTACATGAACATGACTC
CCCGCCGCCCCGGGCCCACCCGCAAGCATTACCAGCCCTATGCCCCACC
ACGCGACTTCGCAGCCTATCGCTCC
ICOS Intracellular domain (amino acid sequence)
(SEQ ID NO: 1929)

(SEQ ID NO: 1929)

T K K K Y S S S V H D P N G E Y M F M R A V N T A
K K S R L T D V T L
ICOS Intracellular domain (nucleotide sequence)
(SEQ ID NO: 1930)

(SEQ ID NO: 1930)

ACAAAAAAGAAGTATTCATCCAGTGTGCACGACCCTAACGGTGAATACA
TGTTCATGAGAGCAGTGAACACAGCCAAAAAATCCAGACTCACAGATGT
GACCCTA
CD3 zeta domain (amino acid sequence)
(SEQ ID NO: 1931)
RVKFSRSADAPAYKQGQNQLYNELNLGRREEYDVLDKRRGRDPEMGGKP
RRKNPQEGLYNELQKDKMAEAYSEIGMKGERRRGKGHDGLYQGLSTATK
DTYDALHMQALPPR
CD3 zeta (nucleic acid sequence) (SEQ ID NO: 1932)
AGAGTGAAGTTCAGCAGGAGCGCAGACGCCCCCGCGTACAAGCAGGGCC
AGAACCAGCTCTATAACGAGCTCAATCTAGGACGAAGAGAGGAGTACGA
TGTTTTGGACAAGAGACGTGGCCGGGACCCTGAGATGGGGGGAAAGCCG
AGAAGGAAGAACCCTCAGGAAGGCCTGTACAATGAACTGCAGAAAGATA
AGATGGCGGAGGCCTACAGTGAGATTGGGATGAAAGGCGAGCGCCGGAG
GGGCAAGGGGCACGATGGCCTTTACCAGGGTCTCAGTACAGCCACCAAG
GACACCTACGACGCCCTTCACATGCAGGCCCTGCCCCCTCGC
CD3 zeta (nucleic acid sequence) (SEQ ID NO: 1945)
CGCGTGAAATTCAGCCGCAGCGCAGATGCTCCAGCCTACAAGCAGGGGC
AGAACCAGCTCTACAACGAACTCAATCTTGGTCGGAGAGAGGAGTACGA
CGTGCTGGACAAGCGGAGAGGACGGGACCCAGAAATGGGCGGGAAGCCG
CGCAGAAAGAATCCCCAAGAGGGCCTGTACAACGAGCTCCAAAAGGATA
AGATGGCAGAAGCCTATAGCGAGATTGGTATGAAAGGGGAACGCAGAAG
AGGCAAAGGCCACGACGGACTGTACCAGGGACTCAGCACCGCCACCAAG
GACACCTATGACGCTCTTCACATGCAGGCCCTGCCGCCTCGG
CD3 zeta domain (amino acid sequence; NCBI
Reference NM_000734.3) (SEQ ID NO: 1933)
RVKFSRSADAPAYQQGQNQLYNELNLGRREEYDVLDKRRGRDPEMGGKP
RRKNPQEGLYNELQKDKMAEAYSEIGMKGERRRGKGHDGLYQGLSTATK
DTYDALHMQALPPR
CD3 zeta (nucleic acid sequence; NCBI Reference
Sequence NM_000734.3); (SEQ ID NO: 1934)
AGAGTGAAGTTCAGCAGGAGCGCAGACGCCCCCGCGTACCAGCAGGGCC
AGAACCAGCTCTATAACGAGCTCAATCTAGGACGAAGAGAGGAGTACGA
TGTTTTGGACAAGAGACGTGGCCGGGACCCTGAGATGGGGGGAAAGCCG
AGAAGGAAGAACCCTCAGGAAGGCCTGTACAATGAACTGCAGAAAGATA
AGATGGCGGAGGCCTACAGTGAGATTGGGATGAAAGGCGAGCGCCGGAG
GGGCAAGGGGCACGATGGCCTTTACCAGGGTCTCAGTACAGCCACCAAG
GACACCTACGACGCCCTTCACATGCAGGCCCTGCCCCCTCGC
IgG4 Hinge (amino acid sequence) (SEQ ID NO: 1935)
ESKYGPPCPPCPAPEFLGGPSVFLFPPKPKDTLMISRTPEVTCVVVDVS
QEDPEVQFNWYVDGVEVHNAKTKPREEQFNSTYRVVSVLTVLHQDWLNG
KEYKCKVSNKGLPSSIEKTISKAKGQPREPQVYTLPPSQEEMTKNQVSL
TCLVKGFYPSDIAVEWESNGQPENNYKTTPPVLDSDGSFFLYSRLTVDK
SRWQEGNVFSCSVMHEALHNHYTQKSLSLSLGKM
IgG4 Hinge (nucleotide sequence) (SEQ ID NO: 1936)
GAGAGCAAGTACGGCCCTCCCTGCCCCCCTTGCCCTGCCCCCGAG
TTCCTGGGCGGACCCAGCGTGTTCCTGTTCCCCCCCAAGCCCAAGGACA
CCCTGATGATCAGCCGGACCCCCGAGGTGACCTGTGTGGTGGTGGACGT
GTCCCAGGAGGACCCCGAGGTCCAGTTCAACTGGTACGTGGACGGCGTG
GAGGTGCACAACGCCAAGACCAAGCCCCGGGAGGAGCAGTTCAATAGCA
CCTACCGGGTGGTGTCCGTGCTGACCGTGCTGCACCAGGACTGGCTGAA
CGGCAAGGAATACAAGTGTAAGGTGTCCAACAAGGGCCTGCCCAGCAGC
ATCGAGAAAACCATCAGCAAGGCCAAGGGCCAGCCTCGGGAGCCCCAGG
TGTACACCCTGCCCCCTAGCCAAGAGGAGATGACCAAGAACCAGGTGTC
CCTGACCTGCCTGGTGAAGGGCTTCTACCCCAGCGACATCGCCGTGGAG
TGGGAGAGCAACGGCCAGCCCGAGAACAACTACAAGACCACCCCCCCTG
TGCTGGACAGCGACGGCAGCTTCTTCCTGTACAGCCGGCTGACCGTGGA
CAAGAGCCGGTGGCAGGAGGGCAACGTCTTTAGCTGCTCCGTGATGCAC
GAGGCCCTGCACAACCACTACACCCAGAAGAGCCTGAGCCTGTCCCTGG
GCAAGATG

[0749] In an embodiment, the CAR molecule comprises a mesothelin CAR described herein, e.g., a mesothelin CAR described in WO 2015/090230, incorporated herein by reference. In embodiments, the mesothelin CAR comprises an amino acid, or has a nucleotide sequence shown in WO 2015/090230 incorporated herein by reference, or a sequence substantially identical to any of the aforesaid sequences (e.g., at least 85%, 90%, 95% or more identical to any of the aforesaid mesothelin CAR sequences). In one embodiment, the CAR molecule comprises a mesothelin CAR, or an antigen binding domain according to Tables 2-3, or a sequence substantially identical thereto (e.g., at least 85%, 90%, 95% or more identical thereto). The amino acid and nucleotide sequences encoding the mesothelin CAR molecules and antigen binding domains (e.g., including one, two, three VH CDRs; and one, two, three VL CDRs according to Kabat or Chothia), are specified in WO 2015/090230.

[0750] In an embodiment, the CAR molecule comprises a CLL1 CAR described herein, e.g., a CLL1 CAR described in US2016/0051651A1, incorporated herein by reference. In embodiments, the CLL1 CAR comprises an amino acid, or has a nucleotide sequence shown in US2016/0051651A1, incorporated herein by reference, or a sequence substantially identical to any of the aforesaid sequences (e.g., at least 85%, 90%, 95% or more identical to any of the aforesaid CLL1 CAR sequences).

[0751] In other embodiments, the CLL1 CAR includes a CAR molecule, or an antigen binding domain according to Table 2 of WO2016/014535, incorporated herein by reference, or a sequence substantially identical to any of the aforesaid sequences (e.g., at least 85%, 90%, 95% or more identical to any of the aforesaid CLL1 CAR sequences). The amino acid and nucleotide sequences encoding the CLL-1 CAR molecules and antigen binding domains (e.g., including one, two, three VH CDRs; and one, two, three VL CDRs according to Kabat or Chothia), are specified in WO2016/014535.

[0752] In an embodiment, the CAR molecule comprises a CD33 CAR described herein, e.g., a CD33 CAR described in US2016/0096892A1, incorporated herein by reference. In embodiments, the CD33 CAR comprises an amino acid, or has a nucleotide sequence shown in US2016/0096892A1, incorporated herein by reference, or a sequence substantially identical to any of the aforesaid sequences (e.g., at least 85%, 90%, 95% or more identical to any of the aforesaid CD33 CAR sequences). In other embodiments, the CD33 CAR CAR or antigen binding domain thereof can include a CAR molecule (e.g., any of CAR33-1 to CAR-33-9), or an antigen binding domain according to Table 2 or 9 of WO2016/014576, incorporated herein by reference, or a sequence substantially identical to any of the aforesaid sequences (e.g., at least 85%, 90%, 95% or more identical to any of the aforesaid CD33 CAR sequences). The amino acid and nucleotide sequences encoding the CD33 CAR molecules and antigen binding domains (e.g., including one, two, three VH CDRs; and one, two, three VL CDRs according to Kabat or Chothia), are specified in WO2016/014576.

[0753] In embodiments, the CAR molecule comprises a CD123 CAR described herein, e.g., a CD123 CAR described in US2014/0322212A1 or US2016/0068601A1, both incorporated herein by reference. In embodiments, the CD123 CAR comprises an amino acid, or has a nucleotide sequence shown in US2014/0322212A1 or US2016/0068601A1, both incorporated herein by reference, or a sequence substantially identical to any of the aforesaid sequences (e.g., at least 85%, 90%, 95% or more identical to any of the aforesaid CD123 CAR sequences). In one embodiment, the CAR molecule comprises a CD123 CAR (e.g., any of the CAR1-CAR8), or an antigen binding domain according to Tables 1-2 of WO 2014/130635, incorporated herein by reference, or a sequence substantially identical thereto (e.g., at least 85%, 90%, 95% or more identical to any of the aforesaid CD123 CAR sequences). The amino acid and nucleotide sequences encoding the CD123 CAR molecules and antigen binding domains (e.g., including one, two, three VH CDRs; and one, two, three VL CDRs according to Kabat or Chothia), are specified in WO 2014/130635.

[0754] In other embodiments, the CAR molecule comprises a CD123 CAR comprises a CAR molecule (e.g., any of the CAR123-1 to CAR123-4 and hzCAR123-1 to hzCAR123-32), or an antigen binding domain according to Tables 2, 6, and 9 of WO2016/028896, incorporated herein by reference, or a sequence substantially identical thereto (e.g., at least 85%, 90%, 95% or more identical to any of the aforesaid CD123 CAR sequences). The amino acid and nucleotide sequences encoding the CD123 CAR molecules and antigen binding domains (e.g., including one, two, three VH CDRs; and one, two, three VL CDRs according to Kabat or Chothia), are specified in WO2016/028896.

[0755] In an embodiment, the CAR molecule comprises an EGFRvIII CAR molecule described herein, e.g., an EGFRvIII CAR described US2014/0322275A1, incorporated herein by reference. In embodiments, the EGFRvIII CAR comprises an amino acid, or has a nucleotide sequence shown in US2014/0322275A1, incorporated herein by reference, or a sequence substantially identical to any of the aforesaid sequences (e.g., at least 85%, 90%, 95% or more identical to any of the aforesaid EGFRvIII CAR sequences). In one embodiment, the CAR molecule comprises an EGFRvIII CAR, or an antigen binding domain according to Table 2 or SEQ ID NO:11 of WO 2014/130657, incorporated herein by reference, or a sequence substantially identical thereto (e.g., at least 85%, 90%, 95% or more identical thereto). The amino acid and nucleotide sequences encoding the EGFRvIII CAR molecules and antigen binding domains (e.g., including one, two, three VH CDRs; and one, two, three VL CDRs according to Kabat or Chothia), are specified in WO 2014/130657.

[0756] In other embodiments, the CAR molecule comprises an a GFR ALPHA-4 CAR, e.g., can include a CAR molecule, or an antigen binding domain according to Table 2 of WO2016/025880, incorporated herein by reference, or a sequence substantially identical to any of the aforesaid sequences (e.g., at least 85%, 90%, 95% or more identical to any of the aforesaid GFR ALPHA-4 sequences). The amino acid and nucleotide sequences encoding the GFR ALPHA-4 CAR molecules and antigen binding domains (e.g., including one, two, three VH CDRs; and one, two, three VL CDRs according to Kabat or Chothia), are specified in WO2016/025880.

[0757] In other embodiments, the CAR molecule comprises an axicabtagene ciloleucel molecule, or one or more sequences of an axicabtagene ciloleucel molecule (Table 15). In one embodiment, the CAR molecule comprises a VL that is at least 85%, 90%, 95%, 98%, 99%, or 100% identical to SEQ ID NO: 409. In one embodiment, the CAR molecule comprises a VH that is at least 85%, 90%, 95%, 98%, 99%, or 100% identical to SEQ ID NO: 410. In one embodiment, the CAR molecule comprises an scFv that is at least 85%, 90%, 95%, 98%, 99%, or 100% identical to SEQ ID NO: 411. In one embodiment, the CAR molecule comprises a sequence at least 85%, 90%, 95%, 98%, 99%, or 100% identical to SEQ ID NO: 412. In one embodiment, the CAR molecule comprises a sequence at least 85%, 90%, 95%, 98%, 99%, or 100% identical to SEQ ID NO: 413 (mut 2). In one embodiment, the CAR molecule comprises a sequence at least 85%, 90%, 95%, 98%, 99%, or 100% identical to SEQ ID NO: 414 (mut 3).

TABLE 15
Axicabtagene ciloleucel sequences

| SEQ ID | | |
|---|---|---|
| NO | Domain | Sequence |
| 409 | VL | DIQMTQTTSSLSASLGDRVTISCRASQDISKYLNWYQQ |
| | | KPDGTVKLLIYHTSRLHSGVPSRFSGSGSGTDYSLTISNLEQEDIATYF |
| | | CQQGNTLPYTFGGGTKLEIT |
| 410 | VH | EVKLQESGPGLVAPSQSLSVTCTVSGVSLPDYG |
| | | VSWIRQPPRKGLEWLGVIWGSETTYYNSALKSRLTIIKDNSKSQVFLK |
| | | M NSLQTDDTAIYYCAKHYYYGGSYAMDYWGQGTSVTVSS |
| 411 | ScFv | DIQMTQTTSSLSASLGDRVTISCRASQDISKYLNWYQQ |
| | | KPDGTVKLLIYHTSRLHSGVPSRFSGSGSGTDYSLTISNLEQEDIATYF |
| | | CQQGNTLPYTFGGGTKLEITGSTSGSGKPGSGEGSTKGEVKLQESGPG |
| | | LVAPSQSLSVTC |
| | | TVSGVSLPDYGVSWIRQPPRKGLEWLGVIWGSETTYYNSALKSRLTIIK |
| | | DNSKSQVFLKM |
| | | NSLQTDDTAIYYCAKHYYYGGSYAMDYWGQGTSVTVSS |
| 412 | Full (1) | MLLLVTSLLLCELPHPAFLLIPDIQMTQTTSSLSASLGDRVTISCRASQDISKYLNWYQQK |
| | | PDGTVKLLIYHTSRLHSGVPSRFSGSGSGTDYSLTISNLEQEDIATYFCQQGNTLPYTFGG |
| | | GTKLEITGSTSGSGKPGSGEGSTKGEVKLQESGPGLVAPSQSLSVTCTVSGVSLPDYGVS |
| | | WIRQPPRKGLEWLGVIWGSETTYYNSALKSRLTIIKDNSKSQVFLKMNSLQTDDTAIYYC |
| | | AKHYYYGGSYAMDYWGQGTSVTVSSAAAIEVMYPPPYLDNEKSNGTIIHVKGKHLCPS |
| | | PLFPGPSKPFWVLVVVGGVLACYSLLVTVAFIIFWVRSKRSRLLHSDYMFMTPRRPGPT |
| | | RKHYQPYAPPRDFAAYRSRVKFSRSADAPAYQQGQNQLYNELNLGRREEYDVLDKRR |
| | | GRDPEMGGKPRRKNPQEGLYNELQKDKMAEAY |
| | | SEIGMKGERRRGKGHDGLYQGLSTATKDTYDALHMQALPPR |
| 413 | Full (2) | MLLLVTSLL LCELPHPAFL LIPDIQMTQT TSSLSASLGD RVTISCRASQ DISKYLNWYQ |
| | | QKPDGTVKLL IYHTSRLHSG |
| | | VPSRFSGSGS GTDYSLTISN LEQEDIATYF CQQGNTLPYT FGGGTKLEIT |
| | | GSTSGSGKPG SGEGSTKGEV KLQESGPGLV |
| | | APSQSLSVTC TVSGVSLPDY GVSWIRQPPR KGLEWLGVIW GSETTYYNSA |
| | | LKSRLTIIKD NSKSQVFLKM NSLQTDDTAI |
| | | YYCAKHYYYG GSYAMDYWGQ GTSVTVSSAA AIEVMYPPPY LDNEKSNGTI |
| | | IHVKGKHLCP SPLFPGPSKP FWVLVVVGGV |
| | | LACYSLLVTV AFIIFWVRSK RSRLLHSDFM NMTPRRPGPT RKHYQPYAPP |
| | | RDFAAYRSRV KFSRSADAPA YQQGQNQLYN |
| | | ELNLGRREEY DVLDKRRGRD PEMGGKPRRK NPQEGLYNEL QKDKMAEAYS |
| | | EIGMKGERRR GKGHDGLYQG LSTATKDTYD |
| | | ALHMQALPPR |
| 414 | Full (3) | MLLLVTSLLL CELPHPAFLL IPDIQMTQTT SSLSASLGDR |
| | | VTISCRASQD ISKYLNWYQQ KPDGTVKLLI YHTSRLHSGV |
| | | PSRFSGSGSG TDYSLTISNL EQEDIATYFC QQGNTLPYTF |
| | | GGGTKLEITG STSGSGKPGS GEGSTKGEVK LQESGPGLVA |
| | | PSQSLSVTCT VSGVSLPDYG VSWIRQPPRK GLEWLGVIWG |
| | | SETTYYNSAL KSRLTIIKDN SKSQVFLKMN SLQTDDTAIY |
| | | YCAKHYYYGG SYAMDYWGQG TSVTVSSAAA IEVMYPPPYL |
| | | DNEKSNGTII HVKGKHLCPS PLFPGPSKPF WVLVVVGGVL |
| | | ACYSLLVTVA HIFWVRSKR SRLLHSDFMF MTPRRPGPTR |
| | | KHYQPYAPPR DFAAYRSRVK FSRSADAPAY QQGQNQLYNE |
| | | LNLGRREEYD VLDKRRGRDP EMGGKPRRKN PQEGLYNELQ |
| | | KDKMAEAYSE IGMKGERRRG KGHDGLYQGL STATKDTYDA |
| | | LHMQALPPR |

[0758] In other embodiments, the CAR molecule comprises one or more sequences selected from Table 16. In one embodiment, the CAR molecule comprises a VL that is at least 85%, 90%, 95%, 98%, 99%, or 100% identical to SEQ ID NO: 415. In one embodiment, the CAR molecule comprises a VH that is at least 85%, 90%, 95%, 98%, 99%, or 100% identical to SEQ ID NO: 416. In one embodiment, the CAR molecule comprises an ScFv that is at least 85%, 90%, 95%, 98%, 99%, or 100% identical to SEQ ID NO: 417. In one embodiment, the CAR molecule comprises a sequence at least 85%, 90%, 95% or more identical to SEQ ID NO: 418. In one embodiment, the CAR molecule comprises a sequence at least 85%, 90%, 95%, 98%, 99%, or 100% identical to SEQ ID NO: 419. In one embodiment, the CAR molecule comprises a sequence at least 85%, 90%, 95%, 98%, 99%, or 100% identical to SEQ ID NO: 420.

TABLE 16

| SEQ ID | | |
|---|---|---|
| NO | Domain | Sequence |
| 415 | VL | ELVLTQSPKFMSTSVGDRVSVTCKASQNVGTNVAWYQQKPGQSPKPLI |
| | | YSATYRNSGVPDRFTGSGSGTDFTLTITNVQSKDLADYFCQYNRYPYTSF |
| | | FFTKLEIKRRS |
| 416 | VH | QVQLLESGAELVRPGSSVKISCKASGYAFSSYWMNWVKQRPGQGLEWI |
| | | GQIYPGDGDTNYNGKFKGQATLTADKSSSTAYMQLSGLTSEDSAVYSC |
| | | ARKTISSVVDFYFDYWGQGTTVT |
| 417 | ScFv | QVQLLESGAELVRPGSSVKISCKASGYAFSSYWMNWVKQRPGQGLEWI |
| | | GQIYPGDGDTNYNGKFKGQATLTADKSSSTAYMQLSGLTSEDSAVYSC |
| | | ARKTISSVVDFYFDYWGQGTTVTGGGSGGGSGGGSGGGSELVLTQSPKF |
| | | MSTSVGDRVSVTCKASQNVGTNVAWYQQKPGQSPKPLIYSATYRNSGV |
| | | PDRFTGSGSGTDFTLTITNVQSKDLADYFCQYNRYPYTSFFFTKLEIKRRS |
| 418 | Full (1) | QVQLLESGAELVRPGSSVKISCKASGYAFSSYWMNWVKQRPGQGLEWI |
| | | GQIYPGDGDTNYNGKFKGQATLTADKSSSTAYMQLSGLTSEDSAVYSC |
| | | ARKTISSVVDFYFDYWGQGTTVTGGGSGGGSGGGSGGGSELVLTQSPKF |
| | | MSTSVGDRVSVTCKASQNVGTNVAWYQQKPGQSPKPLIYSATYRNSGV |
| | | PDRFTGSGSGTDFTLTITNVQSKDLADYFCQYNRYPYTSFFFTKLEIKRRS |
| | | KIEVMYPPPYLDNEKSNGTIIHVKGKHLCPSPLFPGPSKPFWVLVVVGGV |
| | | LACYSLLVTVAFIIFWV |
| | | RSKRSRLLHSDYMFMTPRRPGPTRKHYQPYAPPRDFAAYRS |
| | | RVKFSRSADAPAYQQGQNQLYNELNLGRREEYDVLDKRRGRDPEMGG |
| | | KPRRKNPQEGLYNELQKDKMAEAYSEIGMKGERRRGKGHDGLYQGLS |
| | | TATKDTYDALHMQALPPR |
| 419 | Full (2) | QVQLLESGAELVRPGSSVKISCKASGYAFSSYWMNWVKQRPGQGLEWI |
| | | GQIYPGDGDTNYNGKFKGQATLTADKSSSTAYMQLSGLTSEDSAVYSC |
| | | ARKTISSVVDFYFDYWGQGTTVTGGGSGGGSGGGSGGGSELVLTQSPKF |
| | | MSTSVGDRVSVTCKASQNVGTNVAWYQQKPGQSPKPLIYSATYRNSGV |
| | | PDRFTGSGSGTDFTLTITNVQSKDLADYFCQYNRYPYTSFFFTKLEIKRRS |
| | | KIEVMYPPPYLDNEKSNGTIIHVKGKHLCPSPLFPGPSKPFWVLVVVGGV |
| | | LACYSLLVTVAFIIFWV |
| | | RSKRSRLLHSDFMNMTPRRPGPTRKHYQPYAPPRDFAAYRS |
| | | RVKFSRSADAPAYQQGQNQLYNELNLGRREEYDVLDKRRGRDPEMGG |
| | | KPRRKNPQEGLYNELQKDKMAEAYSEIGMKGERRRGKGHDGLYQGLS |
| | | TATKDTYDALHMQALPPR |
| 420 | Full (3) | QVQLLESGAELVRPGSSVKISCKASGYAFSSYWMNWVKQRPGQGLEWI |
| | | GQIYPGDGDTNYNGKFKGQATLTADKSSSTAYMQLSGLTSEDSAVYSC |
| | | ARKTISSVVDFYFDYWGQGTTVTGGGSGGGSGGGSGGGSELVLTQSPKF |
| | | MSTSVGDRVSVTCKASQNVGTNVAWYQQKPGQSPKPLIYSATYRNSGV |
| | | PDRFTGSGSGTDFTLTITNVQSKDLADYFCQYNRYPYTSFFFTKLEIKRRS |
| | | KIEVMYPPPYLDNEKSNGTIIHVKGKHLCPSPLFPGPSKPFWVLVVVGGV |
| | | LACYSLLVTVAFIIFWV |
| | | RSKRSRLLHSDFMFMTPRRPGPTRKHYQPYAPPRDFAAYRS |
| | | RVKFSRSADAPAYQQGQNQLYNELNLGRREEYDVLDKRRGRDPEMGG |
| | | KPRRKNPQEGLYNELQKDKMAEAYSEIGMKGERRRGKGHDGLYQGLS |
| | | TATKDTYDALHMQALPPR |

[0759] In other embodiments, the CAR molecule comprises one or more sequences selected from Table 17. In one embodiment, the CAR molecule comprises a VL that is at least 85%, 90%, 95%, 98%, 99%, or 100% identical to SEQ ID NO: 421. In one embodiment, the CAR molecule comprises a VH that is at least 85%, 90%, 95%, 98%, 99%, or 100% identical to SEQ ID NO: 422. In one embodiment, the CAR molecule comprises an ScFv that is at least 85%, 90%, 95%, 98%, 99%, or 100% identical to SEQ ID NO: 423.

TABLE 17

| SEQ ID | | |
|---|---|---|
| NO | Domain | Sequence |
| 421 | VL | DIQMTQTT SSLSASLGDR VTISCRASQD ISKYLNWYQQ |
| | | KPDGTVKLLI YHTSRLHSGV PSRFSGSGSG TDYSLTISNL EQEDIATYFC |
| | | QQGNTLPYTF GGGTKLEIT |
| 422 | VH | EVK LQESGPGLVA PSQSLSVTCT VSGVSLPDYG VSWIRQPPRK |
| | | GLEWLGVIWG SETTYYNSAL KSRLTIIKDN SKSQVFLKMN |
| | | SLQTDDTAIY YCAKHYYYGG SYAMDYWGQG TSVTVSSE |
| 423 | ScFv | DIQMTQTT SSLSASLGDR VTISCRASQD ISKYLNWYQQ |
| | | KPDGTVKLLI YHTSRLHSGV PSRFSGSGSG TDYSLTISNL EQEDIATYFC |
| | | QQGNTLPYTF GGGTKLEITG STSGSGKPGS GEGSTKGEVK |
| | | LQESGPGLVA PSQSLSVTCT VSGVSLPDYG |
| | | VSWIRQPPRK GLEWLGVIWG SETTYYNSAL KSRLTIIKDN |
| | | SKSQVFLKMN SLQTDDTAIY YCAKHYYYGG SYAMDYWGQG |
| | | TSVTVSSE |

[0760] In other embodiments, the CAR molecule comprises one or more sequences selected from Table 18. In one embodiment, the CAR molecule comprises a VL that is at least 85%, 90%, 95%, 98%, 99%, or 100% identical to SEQ ID NO: 424. In one embodiment, the CAR molecule comprises a VH that is at least 85%, 90%, 95%, 98%, 99%, or 100% identical to SEQ ID NO: 425. In one embodiment, the CAR molecule comprises an ScFv that is at least 85%, 90%, 95%, 98%, 99%, or 100% identical to SEQ ID NO: 426.

TABLE 18

| SEQ | | |
|---|---|---|
| ID | | |
| NO | Domain | Sequence |
| 424 | VL | DIVLTQSPPSLAMSLGKRATISCRASESVTILGSHLIHWYQQKPGQPPTLLI |
| | | QLASNVQTGVPARFSGSGSRTDFTLTIDPVEEDDVAVYYCLQSRTIPRTF |
| | | GGGTKLEIK |
| 425 | VH | QIQLVQSGPELKKPGETVKISCKASGYTFTDYSINWVKRAPGKGLKWMG |
| | | WINTETREPAYAYDFRGRFAFSLETSASTAYLQINNLKYEDTATYFCALD |
| | | YSYAMDYWGQGTSVTVSS |
| 426 | ScFv | DIVLTQSPPSLAMSLGKRATISCRASESVTILGSHLIHW |
| | | YQQKPGQPPTLLIQLASNVQTGVPARFSGSGSRTDFTLTIDPVEEDDVAV |
| | | YYCLQSRTIPRTFGGGTKLEIKGSTSGSGKPGSGEGSTKGQIQLVQSGPEL |
| | | KKPGETVKISCKASGYTFTDYSINWVKRAPGKGLKWMGWINTETREPA |
| | | YAYDFRGRFAFSLETSASTAYLQINNLKYEDTATYFCALDYSYAMDYW |
| | | GQGTSVTVSS |

### RNA Transfection

[0761] Disclosed herein are methods for producing an in vitro transcribed RNA CAR. The present invention also includes a CAR encoding RNA construct that can be directly transfected into a cell. A method for generating mRNA for use in transfection can involve in vitro transcription (IVT) of a template with specially designed primers, followed by polyA addition, to produce a construct containing 3′ and 5′ untranslated sequence (“UTR”), a 5′ cap and/or Internal Ribosome Entry Site (IRES), the nucleic acid to be expressed, and a polyA tail, typically 50-2000 bases in length (SEQ ID NO:32). RNA so produced can efficiently transfect different kinds of cells. In one aspect, the template includes sequences for the CAR.

[0762] In one aspect, a CAR of the present invention is encoded by a messenger RNA (mRNA). In one aspect, the mRNA encoding a CAR described herein is introduced into an immune effector cell, e.g., a T cell or a NK cell, for production of a CAR-expressing cell, e.g., a CART cell or a CAR NK cell.

[0763] In one embodiment, the in vitro transcribed RNA CAR can be introduced to a cell as a form of transient transfection. The RNA is produced by in vitro transcription using a polymerase chain reaction (PCR)-generated template. DNA of interest from any source can be directly converted by PCR into a template for in vitro mRNA synthesis using appropriate primers and RNA polymerase. The source of the DNA can be, for example, genomic DNA, plasmid DNA, phage DNA, cDNA, synthetic DNA sequence or any other appropriate source of DNA. The desired temple for in vitro transcription is a CAR described herein. For example, the template for the RNA CAR comprises an extracellular region comprising a single chain variable domain of an antibody to a tumor associated antigen described herein; a hinge region (e.g., a hinge region described herein), a transmembrane domain (e.g., a transmembrane domain described herein such as a transmembrane domain of CD8a); and a cytoplasmic region that includes an intracellular signaling domain, e.g., an intracellular signaling domain described herein, e.g., comprising the signaling domain of CD3-zeta and the signaling domain of 4-1BB.

[0764] In one embodiment, the DNA to be used for PCR contains an open reading frame. The DNA can be from a naturally occurring DNA sequence from the genome of an organism. In one embodiment, the nucleic acid can include some or all of the 5′ and/or 3′ untranslated regions (UTRs). The nucleic acid can include exons and introns. In one embodiment, the DNA to be used for PCR is a human nucleic acid sequence. In another embodiment, the DNA to be used for PCR is a human nucleic acid sequence including the 5′ and 3′ UTRs. The DNA can alternatively be an artificial DNA sequence that is not normally expressed in a naturally occurring organism. An exemplary artificial DNA sequence is one that contains portions of genes that are ligated together to form an open reading frame that encodes a fusion protein. The portions of DNA that are ligated together can be from a single organism or from more than one organism.

[0765] PCR is used to generate a template for in vitro transcription of mRNA which is used for transfection. Methods for performing PCR are well known in the art. Primers for use in PCR are designed to have regions that are substantially complementary to regions of the DNA to be used as a template for the PCR. “Substantially complementary,” as used herein, refers to sequences of nucleotides where a majority or all of the bases in the primer sequence are complementary, or one or more bases are non-complementary, or mismatched. Substantially complementary sequences are able to anneal or hybridize with the intended DNA target under annealing conditions used for PCR. The primers can be designed to be substantially complementary to any portion of the DNA template. For example, the primers can be designed to amplify the portion of a nucleic acid that is normally transcribed in cells (the open reading frame), including 5′ and 3′ UTRs. The primers can also be designed to amplify a portion of a nucleic acid that encodes a particular domain of interest. In one embodiment, the primers are designed to amplify the coding region of a human cDNA, including all or portions of the 5′ and 3′ UTRs. Primers useful for PCR can be generated by synthetic methods that are well known in the art. “Forward primers” are primers that contain a region of nucleotides that are substantially complementary to nucleotides on the DNA template that are upstream of the DNA sequence that is to be amplified. “Upstream” is used herein to refer to a location 5, to the DNA sequence to be amplified relative to the coding strand. “Reverse primers” are primers that contain a region of nucleotides that are substantially complementary to a double-stranded DNA template that are downstream of the DNA sequence that is to be amplified. “Downstream” is used herein to refer to a location 3′ to the DNA sequence to be amplified relative to the coding strand.

[0766] Any DNA polymerase useful for PCR can be used in the methods disclosed herein. The reagents and polymerase are commercially available from a number of sources.

[0767] Chemical structures with the ability to promote stability and/or translation efficiency may also be used. The RNA preferably has 5′ and 3′ UTRs. In one embodiment, the 5′ UTR is between one and 3000 nucleotides in length. The length of 5′ and 3′ UTR sequences to be added to the coding region can be altered by different methods, including, but not limited to, designing primers for PCR that anneal to different regions of the UTRs. Using this approach, one of ordinary skill in the art can modify the 5′ and 3′ UTR lengths required to achieve optimal translation efficiency following transfection of the transcribed RNA.

[0768] The 5′ and 3′ UTRs can be the naturally occurring, endogenous 5′ and 3′ UTRs for the nucleic acid of interest. Alternatively, UTR sequences that are not endogenous to the nucleic acid of interest can be added by incorporating the UTR sequences into the forward and reverse primers or by any other modifications of the template. The use of UTR sequences that are not endogenous to the nucleic acid of interest can be useful for modifying the stability and/or translation efficiency of the RNA. For example, it is known that AU-rich elements in 3′ UTR sequences can decrease the stability of mRNA. Therefore, 3′ UTRs can be selected or designed to increase the stability of the transcribed RNA based on properties of UTRs that are well known in the art.

[0769] In one embodiment, the 5′ UTR can contain the Kozak sequence of the endogenous nucleic acid. Alternatively, when a 5′ UTR that is not endogenous to the nucleic acid of interest is being added by PCR as described above, a consensus Kozak sequence can be redesigned by adding the 5′ UTR sequence. Kozak sequences can increase the efficiency of translation of some RNA transcripts, but does not appear to be required for all RNAs to enable efficient translation. The requirement for Kozak sequences for many mRNAs is known in the art. In other embodiments the 5′ UTR can be 5′UTR of an RNA virus whose RNA genome is stable in cells. In other embodiments various nucleotide analogues can be used in the 3′ or 5′ UTR to impede exonuclease degradation of the mRNA.

[0770] To enable synthesis of RNA from a DNA template without the need for gene cloning, a promoter of transcription should be attached to the DNA template upstream of the sequence to be transcribed. When a sequence that functions as a promoter for an RNA polymerase is added to the 5′ end of the forward primer, the RNA polymerase promoter becomes incorporated into the PCR product upstream of the open reading frame that is to be transcribed. In one preferred embodiment, the promoter is a T7 polymerase promoter, as described elsewhere herein. Other useful promoters include, but are not limited to, T3 and SP6 RNA polymerase promoters. Consensus nucleotide sequences for T7, T3 and SP6 promoters are known in the art.

[0771] In a preferred embodiment, the mRNA has both a cap on the 5′ end and a 3′ poly(A) tail which determine ribosome binding, initiation of translation and stability mRNA in the cell. On a circular DNA template, for instance, plasmid DNA, RNA polymerase produces a long concatameric product which is not suitable for expression in eukaryotic cells. The transcription of plasmid DNA linearized at the end of the 3′ UTR results in normal sized mRNA which is not effective in eukaryotic transfection even if it is polyadenylated after transcription.

[0772] On a linear DNA template, phage T7 RNA polymerase can extend the 3′ end of the transcript beyond the last base of the template (Schenborn and Mierendorf, Nuc Acids Res., 13:6223-36 (1985); Nacheva and Berzal-Herranz, Eur. J. Biochem., 270:1485-65 (2003).

[0773] The conventional method of integration of polyA/T stretches into a DNA template is molecular cloning. However polyA/T sequence integrated into plasmid DNA can cause plasmid instability, which is why plasmid DNA templates obtained from bacterial cells are often highly contaminated with deletions and other aberrations. This makes cloning procedures not only laborious and time consuming but often not reliable. That is why a method which allows construction of DNA templates with polyA/T 3′ stretch without cloning highly desirable.

[0774] The polyA/T segment of the transcriptional DNA template can be produced during PCR by using a reverse primer containing a polyT tail, such as 100T tail (SEQ ID NO: 35) (size can be 50-5000 T (SEQ ID NO: 36)), or after PCR by any other method, including, but not limited to, DNA ligation or in vitro recombination. Poly(A) tails also provide stability to RNAs and reduce their degradation. Generally, the length of a poly(A) tail positively correlates with the stability of the transcribed RNA. In one embodiment, the poly(A) tail is between 100 and 5000 adenosines (SEQ ID NO: 37).

[0775] Poly(A) tails of RNAs can be further extended following in vitro transcription with the use of a poly(A) polymerase, such as E. coli polyA polymerase (E-PAP). In one embodiment, increasing the length of a poly(A) tail from 100 nucleotides to between 300 and 400 nucleotides (SEQ ID NO: 38) results in about a two-fold increase in the translation efficiency of the RNA. Additionally, the attachment of different chemical groups to the 3′ end can increase mRNA stability. Such attachment can contain modified/artificial nucleotides, aptamers and other compounds. For example, ATP analogs can be incorporated into the poly(A) tail using poly(A) polymerase. ATP analogs can further increase the stability of the RNA.

[0776] 5′ caps on also provide stability to RNA molecules. In a preferred embodiment, RNAs produced by the methods disclosed herein include a 5′ cap. The 5′ cap is provided using techniques known in the art and described herein (Cougot, et al., Trends in Biochem. Sci., 29:436-444 (2001); Stepinski, et al., RNA, 7:1468-95 (2001); Elango, et al., Biochim. Biophys. Res. Commun., 330:958-966 (2005)).

[0777] The RNAs produced by the methods disclosed herein can also contain an internal ribosome entry site (IRES) sequence. The IRES sequence may be any viral, chromosomal or artificially designed sequence which initiates cap-independent ribosome binding to mRNA and facilitates the initiation of translation. Any solutes suitable for cell electroporation, which can contain factors facilitating cellular permeability and viability such as sugars, peptides, lipids, proteins, antioxidants, and surfactants can be included.

[0778] RNA can be introduced into target cells using any of a number of different methods, for instance, commercially available methods which include, but are not limited to, electroporation (Amaxa Nucleofector-II (Amaxa Biosystems, Cologne, Germany)), (ECM 830 (BTX) (Harvard Instruments, Boston, Mass.) or the Gene Pulser II (BioRad, Denver, Colo.), Multiporator (Eppendort, Hamburg Germany), cationic liposome mediated transfection using lipofection, polymer encapsulation, peptide mediated transfection, or biolistic particle delivery systems such as “gene guns” (see, for example, Nishikawa, et al. Hum Gene Ther., 12(8):861-70 (2001).

### Non-Viral Delivery Methods

[0779] In some aspects, non-viral methods can be used to deliver a nucleic acid encoding a CAR described herein into a cell or tissue or a subject.

[0780] In some embodiments, the non-viral method includes the use of a transposon (also called a transposable element). In some embodiments, a transposon is a piece of DNA that can insert itself at a location in a genome, for example, a piece of DNA that is capable of self-replicating and inserting its copy into a genome, or a piece of DNA that can be spliced out of a longer nucleic acid and inserted into another place in a genome. For example, a transposon comprises a DNA sequence made up of inverted repeats flanking genes for transposition.

[0781] Exemplary methods of nucleic acid delivery using a transposon include a Sleeping Beauty transposon system (SBTS) and a piggyBac (PB) transposon system. See, e.g., Aronovich et al. Hum. Mol. Genet. 20.R1(2011):R14-20; Singh et al. Cancer Res. 15(2008):2961-2971; Huang et al. Mol. Ther. 16(2008):580-589; Grabundzija et al. Mol. Ther. 18(2010):1200-1209; Kebriaei et al. Blood. 122.21(2013):166; Williams. Molecular Therapy 16.9(2008):1515-16; Bell et al. Nat. Protoc. 2.12(2007):3153-65; and Ding et al. Cell. 122.3(2005):473-83, all of which are incorporated herein by reference.

[0782] The SBTS includes two components: 1) a transposon containing a transgene and 2) a source of transposase enzyme. The transposase can transpose the transposon from a carrier plasmid (or other donor DNA) to a target DNA, such as a host cell chromosome/genome. For example, the transposase binds to the carrier plasmid/donor DNA, cuts the transposon (including transgene(s)) out of the plasmid, and inserts it into the genome of the host cell. See, e.g., Aronovich et al. supra.

[0783] Exemplary transposons include a pT2-based transposon. See, e.g., Grabundzija et al. Nucleic Acids Res. 41.3(2013):1829-47; and Singh et al. Cancer Res. 68.8(2008): 2961-2971, all of which are incorporated herein by reference. Exemplary transposases include a Tc1/mariner-type transposase, e.g., the SB10 transposase or the SB11 transposase (a hyperactive transposase which can be expressed, e.g., from a cytomegalovirus promoter). See, e.g., Aronovich et al.; Kebriaei et al.; and Grabundzija et al., all of which are incorporated herein by reference.

[0784] Use of the SBTS permits efficient integration and expression of a transgene, e.g., a nucleic acid encoding a CAR described herein. Provided herein are methods of generating a cell, e.g., T cell or NK cell, that stably expresses a CAR described herein, e.g., using a transposon system such as SBTS.

[0785] In accordance with methods described herein, in some embodiments, one or more nucleic acids, e.g., plasmids, containing the SBTS components are delivered to a cell (e.g., T or NK cell). For example, the nucleic acid(s) are delivered by standard methods of nucleic acid (e.g., plasmid DNA) delivery, e.g., methods described herein, e.g., electroporation, transfection, or lipofection. In some embodiments, the nucleic acid contains a transposon comprising a transgene, e.g., a nucleic acid encoding a CAR described herein. In some embodiments, the nucleic acid contains a transposon comprising a transgene (e.g., a nucleic acid encoding a CAR described herein) as well as a nucleic acid sequence encoding a transposase enzyme. In other embodiments, a system with two nucleic acids is provided, e.g., a dual-plasmid system, e.g., where a first plasmid contains a transposon comprising a transgene, and a second plasmid contains a nucleic acid sequence encoding a transposase enzyme. For example, the first and the second nucleic acids are co-delivered into a host cell.

[0786] In some embodiments, cells, e.g., T or NK cells, are generated that express a CAR described herein by using a combination of gene insertion using the SBTS and genetic editing using a nuclease (e.g., Zinc finger nucleases (ZFNs), Transcription Activator-Like Effector Nucleases (TALENs), the CRISPR/Cas system, or engineered meganuclease re-engineered homing endonucleases).

[0787] In some embodiments, use of a non-viral method of delivery permits reprogramming of cells, e.g., T or NK cells, and direct infusion of the cells into a subject. Advantages of non-viral vectors include but are not limited to the ease and relatively low cost of producing sufficient amounts required to meet a patient population, stability during storage, and lack of immunogenicity.

### Nucleic Acid Constructs Encoding a CAR

[0788] The present invention also provides nucleic acid molecules encoding one or more CAR constructs described herein. In one aspect, the nucleic acid molecule is provided as a messenger RNA transcript. In one aspect, the nucleic acid molecule is provided as a DNA construct.

[0789] Accordingly, in one aspect, the invention pertains to a nucleic acid molecule encoding a chimeric antigen receptor (CAR), wherein the CAR comprises an antigen binding domain that binds to a tumor antigen described herein, a transmembrane domain (e.g., a transmembrane domain described herein), and an intracellular signaling domain (e.g., an intracellular signaling domain described herein) comprising a stimulatory domain, e.g., a costimulatory signaling domain (e.g., a costimulatory signaling domain described herein) and/or a primary signaling domain (e.g., a primary signaling domain described herein, e.g., a zeta chain described herein). In one embodiment, the transmembrane domain is transmembrane domain of a protein selected from the group consisting of the alpha, beta or zeta chain of the T-cell receptor, CD28, CD3 epsilon, CD45, CD4, CD5, CD8, CD9, CD16, CD22, CD33, CD37, CD64, CD80, CD86, CD134, CD137 and CD154. In some embodiments, a transmembrane domain may include at least the transmembrane region(s) of, e.g., KIRDS2, OX40, CD2, CD27, LFA-1 (CD11a, CD18), ICOS (CD278), 4-1BB (CD137), GITR, CD40, BAFFR, HVEM (LIGHTR), SLAMF7, NKp80 (KLRF1), NKp44, NKp30, NKp46, CD160, CD19, IL2R beta, IL2R gamma, IL7Rα, ITGA1, VLA1, CD49a, ITGA4, IA4, CD49D, ITGA6, VLA-6, CD49f, ITGAD, CD11d, ITGAE, CD103, ITGAL, CD11a, LFA-1, ITGAM, CD11b, ITGAX, CD11c, ITGB1, CD29, ITGB2, CD18, LFA-1, ITGB7, NKG2D, NKG2C, TNFR2, DNAM1 (CD226), SLAMF4 (CD244, 2B4), CD84, CD96 (Tactile), CEACAM1, CRTAM, Ly9 (CD229), CD160 (BY55), PSGL1, CD100 (SEMA4D), SLAMF6 (NTB-A, Ly108), SLAM (SLAMF1, CD150, IPO-3), BLAME (SLAMF8), SELPLG (CD162), LTBR, PAG/Cbp, or a functional variant thereof.

[0790] In one embodiment, the transmembrane domain comprises a sequence of SEQ ID NO: 12, or a sequence with 95-99% identity thereof. In one embodiment, the antigen binding domain is connected to the transmembrane domain by a hinge region, e.g., a hinge described herein. In one embodiment, the hinge region comprises SEQ ID NO:403 or SEQ ID NO:405 or SEQ ID NO:407 or SEQ ID NO:10, or a sequence with 95-99% identity thereof. In one embodiment, the isolated nucleic acid molecule further comprises a sequence encoding a costimulatory domain. In one embodiment, the costimulatory domain is a functional signaling domain of a protein selected from the group consisting of OX40, CD27, CD28, CD5, ICAM-1, LFA-1 (CD11a/CD18), ICOS (CD278), and 4-1BB (CD137). Further examples of such costimulatory molecules include CD5, ICAM-1, GITR, BAFFR, HVEM (LIGHTR), SLAMF7, NKp80 (KLRF1), NKp44, NKp30, NKp46, CD160, CD19, CD4, CD8alpha, CD8beta, IL2R beta, IL2R gamma, IL7R alpha, ITGA4, VLA1, CD49a, ITGA4, IA4, CD49D, ITGA6, VLA-6, CD49f, ITGAD, CD11d, ITGAE, CD103, ITGAL, CD11a, LFA-1, ITGAM, CD11b, ITGAX, CD11c, ITGB1, CD29, ITGB2, CD18, LFA-1, ITGB7, NKG2D, NKG2C, TNFR2, TRANCE/RANKL, DNAM1 (CD226), SLAMF4 (CD244, 2B4), CD84, CD96 (Tactile), CEACAM1, CRTAM, Ly9 (CD229), CD160 (BY55), PSGL1, CD100 (SEMA4D), CD69, SLAMF6 (NTB-A, Ly108), SLAM (SLAMF1, CD150, IPO-3), BLAME (SLAMF8), SELPLG (CD162), LTBR, LAT, GADS, SLP-76, and PAG/Cbp, or a functional variant thereof. In one embodiment, the costimulatory domain comprises a sequence of any one of SEQ ID NOs:14, 16, 427-430, or 5, or a sequence with 95-99% identity thereof. In one embodiment, the intracellular signaling domain comprises a functional signaling domain of CD28 and a functional signaling domain of CD3 zeta. In one embodiment, the intracellular signaling domain comprises the sequence of any one of SEQ ID NOs: 427-430 and 5, or a sequence with 95-99% identity thereof, and the sequence of SEQ ID NO: 18 or SEQ ID NO:20, or a sequence with 95-99% identity thereof, wherein the sequences comprising the intracellular signaling domain are expressed in the same frame and as a single polypeptide chain.

[0791] In another aspect, the invention pertains to an isolated nucleic acid molecule encoding a CAR construct comprising a leader sequence of SEQ ID NO: 401, a scFv domain as described herein, a hinge region of SEQ ID NO:403 or SEQ ID NO:405 or SEQ ID NO:407 or SEQ ID NO:10 (or a sequence with 95-99% identity thereof), a transmembrane domain having a sequence of SEQ ID NO: 12 (or a sequence with 95-99% identity thereof), a CD28 costimulatory domain having a sequence selected from SEQ ID NOs: 427-430 and 5 (or a sequence with 95-99% identity thereof), and a CD3 zeta stimulatory domain having a sequence of SEQ ID NO:18 or SEQ ID NO:20 (or a sequence with 95-99% identity thereof).

[0792] In another aspect, the invention pertains to a nucleic acid molecule encoding a chimeric antigen receptor (CAR) molecule that comprises an antigen binding domain, a transmembrane domain, and an intracellular signaling domain comprising a stimulatory domain, and wherein said antigen binding domain binds to a tumor antigen selected from a group consisting of: CD19, CD123, CD22, CD30, CD171, CS-1, CLL-1 (CLECL1), CD33, EGFRvIII, GD2, GD3, BCMA, Tn Ag, PSMA, ROR1, FLT3, FAP, TAG72, CD38, CD44v6, CEA, EPCAM, B7H3, KIT, IL-13Ra2, Mesothelin, IL-11Ra, PSCA, VEGFR2, LewisY, CD24, PDGFR-beta, SSEA-4, CD20, Folate receptor alpha, ERBB2 (Her2/neu), MUC1, EGFR, NCAM, Prostase, PRSS21, PAP, ELF2M, Ephrin B2, IGF-I receptor, CAIX, LMP2, gp100, bcr-abl, tyrosinase, EphA2, Fucosyl GM1, sLe, GM3, TGS5, HMWMAA, o-acetyl-GD2, Folate receptor beta, TEM1/CD248, TEM7R, CLDN6, TSHR, GPRC5D, CXORF61, CD97, CD179a, ALK, Polysialic acid, PLAC1, GloboH, NY-BR-1, UPK2, HAVCR1, ADRB3, PANX3, GPR20, LY6K, OR51E2, TARP, WT1, NY-ESO-1, LAGE-1a, MAGE-A1, legumain, HPV E6,E7, MAGE A1, ETV6-AML, sperm protein 17, XAGE1, Tie 2, MAD-CT-1, MAD-CT-2, Fos-related antigen 1, p53, p53 mutant, prostein, survivin and telomerase, PCTA-1/Galectin 8, MelanA/MART1, Ras mutant, hTERT, sarcoma translocation breakpoints, ML-IAP, ERG (TMPRSS2 ETS fusion gene), NA17, PAX3, Androgen receptor, Cyclin B1, MYCN, RhoC, TRP-2, CYP1B1, BORIS, SART3, PAX5, OY-TES1, LCK, AKAP-4, SSX2, RAGE-1, human telomerase reverse transcriptase, RU1, RU2, intestinal carboxyl esterase, mut hsp70-2, CD79a, CD79b, CD72, LAIR1, FCAR, LILRA2, CD300LF, CLEC12A, BST2, EMR2, LY75, GPC3, FCRL5, and IGLL1.

[0793] In one embodiment, the encoded CAR molecule further comprises a sequence encoding a costimulatory domain. In one embodiment, the costimulatory domain is a functional signaling domain of a protein selected from the group consisting of OX40, CD27, CD28, CD5, ICAM-1, LFA-1 (CD11a/CD18) and 4-1BB (CD137), or a functional variant thereof. In one embodiment, the costimulatory domain comprises a sequence selected from SEQ ID NOs: 14, 16, 427-430, or 5. In one embodiment, the transmembrane domain is a transmembrane domain of a protein selected from the group consisting of the alpha, beta or zeta chain of the T-cell receptor, CD28, CD3 epsilon, CD45, CD4, CD5, CD8, CD9, CD16, CD22, CD33, CD37, CD64, CD80, CD86, CD134, CD137 and CD154, or a functional variant thereof. In one embodiment, the transmembrane domain comprises a sequence of SEQ ID NO:12. In one embodiment, the intracellular signaling domain comprises a functional signaling domain of CD28 and a functional signaling domain of zeta. In one embodiment, the intracellular signaling domain comprises a sequence selected from SEQ ID NOs: 427-430 and 5 and the sequence of SEQ ID NO: 18, wherein the sequences comprising the intracellular signaling domain are expressed in the same frame and as a single polypeptide chain. In one embodiment, the anti-a cancer associated antigen as described herein binding domain is connected to the transmembrane domain by a hinge region. In one embodiment, the hinge region comprises SEQ ID NO:403. In one embodiment, the hinge region comprises SEQ ID NO:405 or SEQ ID NO:407 or SEQ ID NO:10.

[0794] The nucleic acid sequences coding for the desired molecules can be obtained using recombinant methods known in the art, such as, for example by screening libraries from cells expressing the gene, by deriving the gene from a vector known to include the same, or by isolating directly from cells and tissues containing the same, using standard techniques. Alternatively, the gene of interest can be produced synthetically, rather than cloned.

[0795] The present invention also provides vectors in which a DNA of the present invention is inserted. Vectors derived from retroviruses such as the lentivirus are suitable tools to achieve long-term gene transfer since they allow long-term, stable integration of a transgene and its propagation in daughter cells. Lentiviral vectors have the added advantage over vectors derived from onco-retroviruses such as murine leukemia viruses in that they can transduce non-proliferating cells, such as hepatocytes. They also have the added advantage of low immunogenicity. A retroviral vector may also be, e.g., a gammaretroviral vector. A gammaretroviral vector may include, e.g., a promoter, a packaging signal (ψ), a primer binding site (PBS), one or more (e.g., two) long terminal repeats (LTR), and a transgene of interest, e.g., a gene encoding a CAR. A gammaretroviral vector may lack viral structural gens such as gag, pol, and env. Exemplary gammaretroviral vectors include Murine Leukemia Virus (MLV), Spleen-Focus Forming Virus (SFFV), and Myeloproliferative Sarcoma Virus (MPSV), and vectors derived therefrom. Other gammaretroviral vectors are described, e.g., in Tobias Maetzig et al., “Gammaretroviral Vectors: Biology, Technology and Application” Viruses. 2011 June; 3(6): 677-713.

[0796] In another embodiment, the vector comprising the nucleic acid encoding the desired CAR of the invention is an adenoviral vector (A5/35). In another embodiment, the expression of nucleic acids encoding CARs can be accomplished using of transposons such as sleeping beauty, crisper, CAS9, and zinc finger nucleases. See below June et al. 2009 Nature Reviews Immunology 9.10: 704-716, is incorporated herein by reference.

[0797] In brief summary, the expression of natural or synthetic nucleic acids encoding CARs is typically achieved by operably linking a nucleic acid encoding the CAR polypeptide or portions thereof to a promoter, and incorporating the construct into an expression vector. The vectors can be suitable for replication and integration eukaryotes. Typical cloning vectors contain transcription and translation terminators, initiation sequences, and promoters useful for regulation of the expression of the desired nucleic acid sequence.

[0798] The expression constructs of the present invention may also be used for nucleic acid immunization and gene therapy, using standard gene delivery protocols. Methods for gene delivery are known in the art. See, e.g., U.S. Pat. Nos. 5,399,346, 5,580,859, 5,589,466, incorporated by reference herein in their entireties. In another embodiment, the invention provides a gene therapy vector.

[0799] The nucleic acid can be cloned into a number of types of vectors. For example, the nucleic acid can be cloned into a vector including, but not limited to a plasmid, a phagemid, a phage derivative, an animal virus, and a cosmid. Vectors of particular interest include expression vectors, replication vectors, probe generation vectors, and sequencing vectors.

[0800] Further, the expression vector may be provided to a cell in the form of a viral vector. Viral vector technology is well known in the art and is described, for example, in Sambrook et al., 2012, MOLECULAR CLONING: A LABORATORY MANUAL, volumes 1-4, Cold Spring Harbor Press, NY), and in other virology and molecular biology manuals. Viruses, which are useful as vectors include, but are not limited to, retroviruses, adenoviruses, adeno-associated viruses, herpes viruses, and lentiviruses. In general, a suitable vector contains an origin of replication functional in at least one organism, a promoter sequence, convenient restriction endonuclease sites, and one or more selectable markers, (e.g., WO 01/96584; WO 01/29058; and U.S. Pat. No. 6,326,193).

[0801] A number of viral based systems have been developed for gene transfer into mammalian cells. For example, retroviruses provide a convenient platform for gene delivery systems. A selected gene can be inserted into a vector and packaged in retroviral particles using techniques known in the art. The recombinant virus can then be isolated and delivered to cells of the subject either in vivo or ex vivo. A number of retroviral systems are known in the art. In some embodiments, adenovirus vectors are used. A number of adenovirus vectors are known in the art. In one embodiment, lentivirus vectors are used.

[0802] Additional promoter elements, e.g., enhancers, regulate the frequency of transcriptional initiation. Typically, these are located in the region 30-110 bp upstream of the start site, although a number of promoters have been shown to contain functional elements downstream of the start site as well. The spacing between promoter elements frequently is flexible, so that promoter function is preserved when elements are inverted or moved relative to one another. In the thymidine kinase (tk) promoter, the spacing between promoter elements can be increased to 50 bp apart before activity begins to decline. Depending on the promoter, it appears that individual elements can function either cooperatively or independently to activate transcription. Exemplary promoters include the CMV IE gene, EF-1α, ubiquitin C, or phosphoglycerokinase (PGK) promoters.

[0803] An example of a promoter that is capable of expressing a CAR encoding nucleic acid molecule in a mammalian T cell is the EF1a promoter. The native EF1a promoter drives expression of the alpha subunit of the elongation factor-1 complex, which is responsible for the enzymatic delivery of aminoacyl tRNAs to the ribosome. The EF1a promoter has been extensively used in mammalian expression plasmids and has been shown to be effective in driving CAR expression from nucleic acid molecules cloned into a lentiviral vector. See, e.g., Milone et al., Mol. Ther. 17(8): 1453-1464 (2009). In one aspect, the EF1a promoter comprises the sequence provided as SEQ ID NO:400.

[0804] Another example of a promoter is the immediate early cytomegalovirus (CMV) promoter sequence. This promoter sequence is a strong constitutive promoter sequence capable of driving high levels of expression of any polynucleotide sequence operatively linked thereto. However, other constitutive promoter sequences may also be used, including, but not limited to the simian virus 40 (SV40) early promoter, mouse mammary tumor virus (MMTV), human immunodeficiency virus (HIV) long terminal repeat (LTR) promoter, MoMuLV promoter, an avian leukemia virus promoter, an Epstein-Barr virus immediate early promoter, a Rous sarcoma virus promoter, as well as human gene promoters such as, but not limited to, the actin promoter, the myosin promoter, the elongation factor-1α promoter, the hemoglobin promoter, and the creatine kinase promoter. Further, the invention should not be limited to the use of constitutive promoters. Inducible promoters are also contemplated as part of the invention. The use of an inducible promoter provides a molecular switch capable of turning on expression of the polynucleotide sequence which it is operatively linked when such expression is desired, or turning off the expression when expression is not desired. Examples of inducible promoters include, but are not limited to a metallothionine promoter, a glucocorticoid promoter, a progesterone promoter, and a tetracycline promoter.

[0805] A vector may also include, e.g., a signal sequence to facilitate secretion, a polyadenylation signal and transcription terminator (e.g., from Bovine Growth Hormone (BGH) gene), an element allowing episomal replication and replication in prokaryotes (e.g. SV40 origin and ColE1 or others known in the art) and/or elements to allow selection (e.g., ampicillin resistance gene and/or zeocin marker).

[0806] In order to assess the expression of a CAR polypeptide or portions thereof, the expression vector to be introduced into a cell can also contain either a selectable marker gene or a reporter gene or both to facilitate identification and selection of expressing cells from the population of cells sought to be transfected or infected through viral vectors. In other aspects, the selectable marker may be carried on a separate piece of DNA and used in a co-transfection procedure. Both selectable markers and reporter genes may be flanked with appropriate regulatory sequences to enable expression in the host cells. Useful selectable markers include, for example, antibiotic-resistance genes, such as neo and the like.

[0807] Reporter genes are used for identifying potentially transfected cells and for evaluating the functionality of regulatory sequences. In general, a reporter gene is a gene that is not present in or expressed by the recipient organism or tissue and that encodes a polypeptide whose expression is manifested by some easily detectable property, e.g., enzymatic activity. Expression of the reporter gene is assayed at a suitable time after the DNA has been introduced into the recipient cells. Suitable reporter genes may include genes encoding luciferase, beta-galactosidase, chloramphenicol acetyl transferase, secreted alkaline phosphatase, or the green fluorescent protein gene (e.g., Ui-Tei et al., 2000 FEBS Letters 479: 79-82). Suitable expression systems are well known and may be prepared using known techniques or obtained commercially. In general, the construct with the minimal 5′ flanking region showing the highest level of expression of reporter gene is identified as the promoter. Such promoter regions may be linked to a reporter gene and used to evaluate agents for the ability to modulate promoter-driven transcription.

[0808] Methods of introducing and expressing genes into a cell are known in the art. In the context of an expression vector, the vector can be readily introduced into a host cell, e.g., mammalian, bacterial, yeast, or insect cell by any method in the art. For example, the expression vector can be transferred into a host cell by physical, chemical, or biological means.

[0809] Physical methods for introducing a polynucleotide into a host cell include calcium phosphate precipitation, lipofection, particle bombardment, microinjection, electroporation, and the like. Methods for producing cells comprising vectors and/or exogenous nucleic acids are well-known in the art. See, for example, Sambrook et al., 2012, MOLECULAR CLONING: A LABORATORY MANUAL, volumes 1-4, Cold Spring Harbor Press, NY). A preferred method for the introduction of a polynucleotide into a host cell is calcium phosphate transfection

[0810] Biological methods for introducing a polynucleotide of interest into a host cell include the use of DNA and RNA vectors. Viral vectors, and especially retroviral vectors, have become the most widely used method for inserting genes into mammalian, e.g., human cells. Other viral vectors can be derived from lentivirus, poxviruses, herpes simplex virus I, adenoviruses and adeno-associated viruses, and the like. See, for example, U.S. Pat. Nos. 5,350,674 and 5,585,362.

[0811] Chemical means for introducing a polynucleotide into a host cell include colloidal dispersion systems, such as macromolecule complexes, nanocapsules, microspheres, beads, and lipid-based systems including oil-in-water emulsions, micelles, mixed micelles, and liposomes. An exemplary colloidal system for use as a delivery vehicle in vitro and in vivo is a liposome (e.g., an artificial membrane vesicle). Other methods of state-of-the-art targeted delivery of nucleic acids are available, such as delivery of polynucleotides with targeted nanoparticles or other suitable sub-micron sized delivery system.

[0812] In the case where a non-viral delivery system is utilized, an exemplary delivery vehicle is a liposome. The use of lipid formulations is contemplated for the introduction of the nucleic acids into a host cell (in vitro, ex vivo or in vivo). In another aspect, the nucleic acid may be associated with a lipid. The nucleic acid associated with a lipid may be encapsulated in the aqueous interior of a liposome, interspersed within the lipid bilayer of a liposome, attached to a liposome via a linking molecule that is associated with both the liposome and the oligonucleotide, entrapped in a liposome, complexed with a liposome, dispersed in a solution containing a lipid, mixed with a lipid, combined with a lipid, contained as a suspension in a lipid, contained or complexed with a micelle, or otherwise associated with a lipid. Lipid, lipid/DNA or lipid/expression vector associated compositions are not limited to any particular structure in solution. For example, they may be present in a bilayer structure, as micelles, or with a “collapsed” structure. They may also simply be interspersed in a solution, possibly forming aggregates that are not uniform in size or shape. Lipids are fatty substances which may be naturally occurring or synthetic lipids. For example, lipids include the fatty droplets that naturally occur in the cytoplasm as well as the class of compounds which contain long-chain aliphatic hydrocarbons and their derivatives, such as fatty acids, alcohols, amines, amino alcohols, and aldehydes.

[0813] Lipids suitable for use can be obtained from commercial sources. For example, dimyristyl phosphatidylcholine (“DMPC”) can be obtained from Sigma, St. Louis, Mo.; dicetyl phosphate (“DCP”) can be obtained from K & K Laboratories (Plainview, N.Y.); cholesterol (“Choi”) can be obtained from Calbiochem-Behring; dimyristyl phosphatidylglycerol (“DMPG”) and other lipids may be obtained from Avanti Polar Lipids, Inc. (Birmingham, Ala.). Stock solutions of lipids in chloroform or chloroform/methanol can be stored at about −20° C. Chloroform is used as the only solvent since it is more readily evaporated than methanol. “Liposome” is a generic term encompassing a variety of single and multilamellar lipid vehicles formed by the generation of enclosed lipid bilayers or aggregates. Liposomes can be characterized as having vesicular structures with a phospholipid bilayer membrane and an inner aqueous medium. Multilamellar liposomes have multiple lipid layers separated by aqueous medium. They form spontaneously when phospholipids are suspended in an excess of aqueous solution. The lipid components undergo self-rearrangement before the formation of closed structures and entrap water and dissolved solutes between the lipid bilayers (Ghosh et al., 1991 Glycobiology 5: 505-10). However, compositions that have different structures in solution than the normal vesicular structure are also encompassed. For example, the lipids may assume a micellar structure or merely exist as nonuniform aggregates of lipid molecules. Also contemplated are lipofectamine-nucleic acid complexes.

[0814] Regardless of the method used to introduce exogenous nucleic acids into a host cell or otherwise expose a cell to the inhibitor of the present invention, in order to confirm the presence of the recombinant DNA sequence in the host cell, a variety of assays may be performed. Such assays include, for example, “molecular biological” assays well known to those of skill in the art, such as Southern and Northern blotting, RT-PCR and PCR; “biochemical” assays, such as detecting the presence or absence of a particular peptide, e.g., by immunological means (ELISAs and Western blots) or by assays described herein to identify agents falling within the scope of the invention.

[0815] The present invention further provides a vector comprising a CAR encoding nucleic acid molecule. In one aspect, a CAR vector can be directly transduced into a cell, e.g., a T cell or a NK cell. In one aspect, the vector is a cloning or expression vector, e.g., a vector including, but not limited to, one or more plasmids (e.g., expression plasmids, cloning vectors, minicircles, minivectors, double minute chromosomes), retroviral and lentiviral vector constructs. In one aspect, the vector is capable of expressing the CAR construct in mammalian immune effector cells (e.g., T cells, NK cells). In one aspect, the mammalian T cell is a human T cell. In one aspect, the mammalian NK cell is a human NK cell.

### Sources of Cells

[0816] Prior to expansion and genetic modification or other modification, a source of cells, e.g., T cells or natural killer (NK) cells, can be obtained from a subject. The term “subject” is intended to include living organisms in which an immune response can be elicited (e.g., mammals). Examples of subjects include humans, monkeys, chimpanzees, dogs, cats, mice, rats, and transgenic species thereof. T cells can be obtained from a number of sources, including peripheral blood mononuclear cells, bone marrow, lymph node tissue, cord blood, thymus tissue, tissue from a site of infection, ascites, pleural effusion, spleen tissue, and tumors.

[0817] In certain aspects of the present disclosure, immune effector cells, e.g., T cells, can be obtained from a unit of blood collected from a subject using any number of techniques known to the skilled artisan, such as Ficoll™ separation. In one preferred aspect, cells from the circulating blood of an individual are obtained by apheresis. The apheresis product typically contains lymphocytes, including T cells, monocytes, granulocytes, B cells, other nucleated white blood cells, red blood cells, and platelets. In one aspect, the cells collected by apheresis may be washed to remove the plasma fraction and, optionally, to place the cells in an appropriate buffer or media for subsequent processing steps. In one embodiment, the cells are washed with phosphate buffered saline (PBS). In an alternative embodiment, the wash solution lacks calcium and may lack magnesium or may lack many if not all divalent cations.

[0818] Initial activation steps in the absence of calcium can lead to magnified activation. As those of ordinary skill in the art would readily appreciate a washing step may be accomplished by methods known to those in the art, such as by using a semi-automated “flow-through” centrifuge (for example, the Cobe 2991 cell processor, the Baxter CytoMate, or the Haemonetics Cell Saver 5) according to the manufacturer's instructions. After washing, the cells may be resuspended in a variety of biocompatible buffers, such as, for example, Ca-free, Mg-free PBS, PlasmaLyte A, or other saline solution with or without buffer. Alternatively, the undesirable components of the apheresis sample may be removed and the cells directly resuspended in culture media.

[0819] It is recognized that the methods of the application can utilize culture media conditions comprising 5% or less, for example 2%, human AB serum, and employ known culture media conditions and compositions, for example those described in Smith et al., “Ex vivo expansion of human T cells for adoptive immunotherapy using the novel Xeno-free CTS Immune Cell Serum Replacement” Clinical & Translational Immunology (2015) 4, e31; doi:10.1038/cti.2014.31.

[0820] In one aspect, T cells are isolated from peripheral blood lymphocytes by lysing the red blood cells and depleting the monocytes, for example, by centrifugation through a PERCOLL™ gradient or by counterflow centrifugal elutriation.

[0821] The methods described herein can include, e.g., selection of a specific subpopulation of immune effector cells, e.g., T cells, that are a T regulatory cell-depleted population, CD25+ depleted cells, using, e.g., a negative selection technique, e.g., described herein. Preferably, the population of T regulatory depleted cells contains less than 30%, 25%, 20%, 15%, 10%, 5%, 4%, 3%, 2%, 1% of CD25+ cells.

[0822] In one embodiment, T regulatory cells, e.g., CD25+ T cells, are removed from the population using an anti-CD25 antibody, or fragment thereof, or a CD25-binding ligand, IL-2. In one embodiment, the anti-CD25 antibody, or fragment thereof, or CD25-binding ligand is conjugated to a substrate, e.g., a bead, or is otherwise coated on a substrate, e.g., a bead. In one embodiment, the anti-CD25 antibody, or fragment thereof, is conjugated to a substrate as described herein.

[0823] In one embodiment, the T regulatory cells, e.g., CD25+ T cells, are removed from the population using CD25 depletion reagent from Miltenyi™. In one embodiment, the ratio of cells to CD25 depletion reagent is 1e7 cells to 20 uL, or 1e7 cells to 15 uL, or 1e7 cells to 10 uL, or 1e7 cells to 5 uL, or 1e7 cells to 2.5 uL, or 1e7 cells to 1.25 uL. In one embodiment, e.g., for T regulatory cells, e.g., CD25+ depletion, greater than 500 million cells/ml is used. In a further aspect, a concentration of cells of 600, 700, 800, or 900 million cells/ml is used.

[0824] In one embodiment, the population of immune effector cells to be depleted includes about 6×10⁹ CD25+ T cells. In other aspects, the population of immune effector cells to be depleted include about 1×10⁹ to 1×10¹⁰ CD25+ T cell, and any integer value in between. In one embodiment, the resulting population T regulatory depleted cells has 2×10⁹ T regulatory cells, e.g., CD25+ cells, or less (e.g., 1×10⁹, 5×10⁸, 1×10⁸, 5×10⁷, 1×10⁷, or less CD25+ cells).

[0825] In one embodiment, the T regulatory cells, e.g., CD25+ cells, are removed from the population using the CliniMAC system with a depletion tubing set, such as, e.g., tubing 162-01. In one embodiment, the CliniMAC system is run on a depletion setting such as, e.g., DEPLETION2.1.

[0826] Without wishing to be bound by a particular theory, decreasing the level of negative regulators of immune cells (e.g., decreasing the number of unwanted immune cells, e.g., T_{REG} cells), in a subject prior to apheresis or during manufacturing of a CAR-expressing cell product can reduce the risk of subject relapse. For example, methods of depleting T_{REG} cells are known in the art. Methods of decreasing T_{REG} cells include, but are not limited to, cyclophosphamide, anti-GITR antibody (an anti-GITR antibody described herein), CD25-depletion, and combinations thereof.

[0827] In some embodiments, the manufacturing methods comprise reducing the number of (e.g., depleting) T_{REG} cells prior to manufacturing of the CAR-expressing cell. For example, manufacturing methods comprise contacting the sample, e.g., the apheresis sample, with an anti-GITR antibody and/or an anti-CD25 antibody (or fragment thereof, or a CD25-binding ligand), e.g., to deplete T_{REG} cells prior to manufacturing of the CAR-expressing cell (e.g., T cell, NK cell) product.

[0828] In an embodiment, a subject is pre-treated with one or more therapies that reduce T_{REG} cells prior to collection of cells for CAR-expressing cell product manufacturing, thereby reducing the risk of subject relapse to CAR-expressing cell treatment. In an embodiment, methods of decreasing T_{REG} cells include, but are not limited to, administration to the subject of one or more of cyclophosphamide, anti-GITR antibody, CD25-depletion, or a combination thereof. Administration of one or more of cyclophosphamide, anti-GITR antibody, CD25-depletion, or a combination thereof, can occur before, during or after an infusion of the CAR-expressing cell product.

[0829] In an embodiment, a subject is pre-treated with cyclophosphamide prior to collection of cells for CAR-expressing cell product manufacturing, thereby reducing the risk of subject relapse to CAR-expressing cell treatment. In an embodiment, a subject is pre-treated with an anti-GITR antibody prior to collection of cells for CAR-expressing cell product manufacturing, thereby reducing the risk of subject relapse to CAR-expressing cell treatment.

[0830] In one embodiment, the population of cells to be removed are neither the regulatory T cells or tumor cells, but cells that otherwise negatively affect the expansion and/or function of CART cells, e.g. cells expressing CD14, CD11b, CD33, CD15, or other markers expressed by potentially immune suppressive cells. In one embodiment, such cells are envisioned to be removed concurrently with regulatory T cells and/or tumor cells, or following said depletion, or in another order.

[0831] The methods described herein can include more than one selection step, e.g., more than one depletion step. Enrichment of a T cell population by negative selection can be accomplished, e.g., with a combination of antibodies directed to surface markers unique to the negatively selected cells. One method is cell sorting and/or selection via negative magnetic immunoadherence or flow cytometry that uses a cocktail of monoclonal antibodies directed to cell surface markers present on the cells negatively selected. For example, to enrich for CD4+ cells by negative selection, a monoclonal antibody cocktail can include antibodies to CD14, CD20, CD11b, CD16, HLA-DR, and CD8.

[0832] The methods described herein can further include removing cells from the population which express a tumor antigen, e.g., a tumor antigen that does not comprise CD25, e.g., CD19, CD30, CD38, CD123, CD20, CD14 or CD11b, to thereby provide a population of T regulatory depleted, e.g., CD25+ depleted, and tumor antigen depleted cells that are suitable for expression of a CAR, e.g., a CAR described herein. In one embodiment, tumor antigen expressing cells are removed simultaneously with the T regulatory, e.g., CD25+ cells. For example, an anti-CD25 antibody, or fragment thereof, and an anti-tumor antigen antibody, or fragment thereof, can be attached to the same substrate, e.g., bead, which can be used to remove the cells or an anti-CD25 antibody, or fragment thereof, or the anti-tumor antigen antibody, or fragment thereof, can be attached to separate beads, a mixture of which can be used to remove the cells. In other embodiments, the removal of T regulatory cells, e.g., CD25+ cells, and the removal of the tumor antigen expressing cells is sequential, and can occur, e.g., in either order.

[0833] Also provided are methods that include removing cells from the population which express a check point inhibitor, e.g., a check point inhibitor described herein, e.g., one or more of PD1+ cells, LAG3+ cells, and TIM3+ cells, to thereby provide a population of T regulatory depleted, e.g., CD25+ depleted cells, and check point inhibitor depleted cells, e.g., PD1+, LAG3+ and/or TIM3+ depleted cells. Exemplary check point inhibitors include B7-H1, B7-1, CD160, P1H, 2B4, PD1, TIM3, CEACAM (e.g., CEACAM-1, CEACAM-3 and/or CEACAM-5), LAG3, TIGIT, CTLA-4, BTLA and LAIR1. In one embodiment, check point inhibitor expressing cells are removed simultaneously with the T regulatory, e.g., CD25+ cells. For example, an anti-CD25 antibody, or fragment thereof, and an anti-check point inhibitor antibody, or fragment thereof, can be attached to the same bead which can be used to remove the cells, or an anti-CD25 antibody, or fragment thereof, and the anti-check point inhibitor antibody, or fragment there, can be attached to separate beads, a mixture of which can be used to remove the cells. In other embodiments, the removal of T regulatory cells, e.g., CD25+ cells, and the removal of the check point inhibitor expressing cells is sequential, and can occur, e.g., in either order.

[0834] Methods described herein can include a positive selection step. For example, T cells can isolated by incubation with anti-CD3/anti-CD28 (e.g., 3×28)-conjugated beads, such as DYNABEADS® M-450 CD3/CD28 T, for a time period sufficient for positive selection of the desired T cells. In one embodiment, the time period is about 30 minutes. In a further embodiment, the time period ranges from 30 minutes to 36 hours or longer and all integer values there between. In a further embodiment, the time period is at least 1, 2, 3, 4, 5, or 6 hours. In yet another embodiment, the time period is 10 to 24 hours, e.g., 24 hours. Longer incubation times may be used to isolate T cells in any situation where there are few T cells as compared to other cell types, such in isolating tumor infiltrating lymphocytes (TIL) from tumor tissue or from immunocompromised individuals. Further, use of longer incubation times can increase the efficiency of capture of CD8+ T cells. Thus, by simply shortening or lengthening the time T cells are allowed to bind to the CD3/CD28 beads and/or by increasing or decreasing the ratio of beads to T cells (as described further herein), subpopulations of T cells can be preferentially selected for or against at culture initiation or at other time points during the process. Additionally, by increasing or decreasing the ratio of anti-CD3 and/or anti-CD28 antibodies on the beads or other surface, subpopulations of T cells can be preferentially selected for or against at culture initiation or at other desired time points.

[0835] In one embodiment, a T cell population can be selected that expresses one or more of IFN-γ, TNFα, IL-17A, IL-2, IL-3, IL-4, GM-CSF, IL-10, IL-13, granzyme B, and perforin, or other appropriate molecules, e.g., other cytokines. Methods for screening for cell expression can be determined, e.g., by the methods described in PCT Publication No.: WO 2013/126712.

[0836] For isolation of a desired population of cells by positive or negative selection, the concentration of cells and surface (e.g., particles such as beads) can be varied. In certain aspects, it may be desirable to significantly decrease the volume in which beads and cells are mixed together (e.g., increase the concentration of cells), to ensure maximum contact of cells and beads. For example, in one aspect, a concentration of 10 billion cells/ml, 9 billion/ml, 8 billion/ml, 7 billion/ml, 6 billion/ml, or 5 billion/ml is used. In one aspect, a concentration of 1 billion cells/ml is used. In yet one aspect, a concentration of cells from 75, 80, 85, 90, 95, or 100 million cells/ml is used. In further aspects, concentrations of 125 or 150 million cells/ml can be used.

[0837] Using high concentrations can result in increased cell yield, cell activation, and cell expansion. Further, use of high cell concentrations allows more efficient capture of cells that may weakly express target antigens of interest, such as CD28-negative T cells, or from samples where there are many tumor cells present (e.g., leukemic blood, tumor tissue, etc.). Such populations of cells may have therapeutic value and would be desirable to obtain. For example, using high concentration of cells allows more efficient selection of CD8+ T cells that normally have weaker CD28 expression.

[0838] In a related aspect, it may be desirable to use lower concentrations of cells. By significantly diluting the mixture of T cells and surface (e.g., particles such as beads), interactions between the particles and cells is minimized This selects for cells that express high amounts of desired antigens to be bound to the particles. For example, CD4+ T cells express higher levels of CD28 and are more efficiently captured than CD8+ T cells in dilute concentrations. In one aspect, the concentration of cells used is 5×10⁶/ml. In other aspects, the concentration used can be from about 1×10⁵/ml to 1×10⁶/ml, and any integer value in between.

[0839] In other aspects, the cells may be incubated on a rotator for varying lengths of time at varying speeds at either 2-10° C. or at room temperature.

[0840] T cells for stimulation can also be frozen after a washing step. Wishing not to be bound by theory, the freeze and subsequent thaw step provides a more uniform product by removing granulocytes and to some extent monocytes in the cell population. After the washing step that removes plasma and platelets, the cells may be suspended in a freezing solution. While many freezing solutions and parameters are known in the art and will be useful in this context, one method involves using PBS containing 20% DMSO and 8% human serum albumin, or culture media containing 10% Dextran 40 and 5% Dextrose, 20% Human Serum Albumin and 7.5% DMSO, or 31.25% Plasmalyte-A, 31.25% Dextrose 5%, 0.45% NaCl, 10% Dextran 40 and 5% Dextrose, 20% Human Serum Albumin, and 7.5% DMSO or other suitable cell freezing media containing for example, Hespan and PlasmaLyte A, the cells then are frozen to −80° C. at a rate of 1° per minute and stored in the vapor phase of a liquid nitrogen storage tank. Other methods of controlled freezing may be used as well as uncontrolled freezing immediately at −20° C. or in liquid nitrogen.

[0841] In certain aspects, cryopreserved cells are thawed and washed as described herein and allowed to rest for one hour at room temperature prior to activation using the methods of the present invention.

[0842] Also contemplated in the context of the invention is the collection of blood samples or apheresis product from a subject at a time period prior to when the expanded cells as described herein might be needed. As such, the source of the cells to be expanded can be collected at any time point necessary, and desired cells, such as T cells, isolated and frozen for later use in immune effector cell therapy for any number of diseases or conditions that would benefit from immune effector cell therapy, such as those described herein. In one aspect a blood sample or an apheresis is taken from a generally healthy subject. In certain aspects, a blood sample or an apheresis is taken from a generally healthy subject who is at risk of developing a disease, but who has not yet developed a disease, and the cells of interest are isolated and frozen for later use. In certain aspects, the T cells may be expanded, frozen, and used at a later time. In certain aspects, samples are collected from a patient shortly after diagnosis of a particular disease as described herein but prior to any treatments. In a further aspect, the cells are isolated from a blood sample or an apheresis from a subject prior to any number of relevant treatment modalities, including but not limited to treatment with agents such as natalizumab, efalizumab, antiviral agents, chemotherapy, radiation, immunosuppressive agents, such as cyclosporin, azathioprine, methotrexate, mycophenolate, and FK506, antibodies, or other immunoablative agents such as CAMPATH, anti-CD3 antibodies, cytoxan, fludarabine, cyclosporin, FK506, rapamycin, mycophenolic acid, steroids, FR901228, and irradiation.

[0843] In a further aspect of the present invention, T cells are obtained from a patient directly following treatment that leaves the subject with functional T cells. In this regard, it has been observed that following certain cancer treatments, in particular treatments with drugs that damage the immune system, shortly after treatment during the period when patients would normally be recovering from the treatment, the quality of T cells obtained may be optimal or improved for their ability to expand ex vivo. Likewise, following ex vivo manipulation using the methods described herein, these cells may be in a preferred state for enhanced engraftment and in vivo expansion. Thus, it is contemplated within the context of the present invention to collect blood cells, including T cells, dendritic cells, or other cells of the hematopoietic lineage, during this recovery phase. Further, in certain aspects, mobilization (for example, mobilization with GM-CSF) and conditioning regimens can be used to create a condition in a subject wherein repopulation, recirculation, regeneration, and/or expansion of particular cell types is favored, especially during a defined window of time following therapy. Illustrative cell types include T cells, B cells, dendritic cells, and other cells of the immune system.

[0844] In one embodiment, the immune effector cells expressing a CAR molecule, e.g., a CAR molecule described herein, are obtained from a subject that has received a low, immune enhancing dose of an mTOR inhibitor. In an embodiment, the population of immune effector cells, e.g., T cells, to be engineered to express a CAR, are harvested after a sufficient time, or after sufficient dosing of the low, immune enhancing, dose of an mTOR inhibitor, such that the level of PD1 negative immune effector cells, e.g., T cells, or the ratio of PD1 negative immune effector cells, e.g., T cells/PD1 positive immune effector cells, e.g., T cells, in the subject or harvested from the subject has been, at least transiently, increased.

[0845] In other embodiments, population of immune effector cells, e.g., T cells, which have, or will be engineered to express a CAR, can be treated ex vivo by contact with an amount of an mTOR inhibitor that increases the number of PD1 negative immune effector cells, e.g., T cells or increases the ratio of PD1 negative immune effector cells, e.g., T cells/PD1 positive immune effector cells, e.g., T cells.

[0846] In one embodiment, a T cell population is diacylglycerol kinase (DGK)-deficient. DGK-deficient cells include cells that do not express DGK RNA or protein, or have reduced or inhibited DGK activity. DGK-deficient cells can be generated by genetic approaches, e.g., administering RNA-interfering agents, e.g., siRNA, shRNA, miRNA, to reduce or prevent DGK expression. Alternatively, DGK-deficient cells can be generated by treatment with DGK inhibitors described herein.

[0847] In one embodiment, a T cell population is Ikaros-deficient. Ikaros-deficient cells include cells that do not express Ikaros RNA or protein, or have reduced or inhibited Ikaros activity, Ikaros-deficient cells can be generated by genetic approaches, e.g., administering RNA-interfering agents, e.g., siRNA, shRNA, miRNA, to reduce or prevent Ikaros expression. Alternatively, Ikaros-deficient cells can be generated by treatment with Ikaros inhibitors, e.g., lenalidomide.

[0848] In embodiments, a T cell population is DGK-deficient and Ikaros-deficient, e.g., does not express DGK and Ikaros, or has reduced or inhibited DGK and Ikaros activity. Such DGK and Ikaros-deficient cells can be generated by any of the methods described herein.

[0849] In an embodiment, the NK cells are obtained from the subject. In another embodiment, the NK cells are an NK cell line, e.g., NK-92 cell line (Conkwest).

### Allogeneic CAR

[0850] In embodiments described herein, the immune effector cell can be an allogeneic immune effector cell, e.g., T cell or NK cell. For example, the cell can be an allogeneic T cell, e.g., an allogeneic T cell lacking expression of a functional T cell receptor (TCR) and/or human leukocyte antigen (HLA), e.g., HLA class I and/or HLA class II.

[0851] A T cell lacking a functional TCR can be, e.g., engineered such that it does not express any functional TCR on its surface, engineered such that it does not express one or more subunits that comprise a functional TCR or engineered such that it produces very little functional TCR on its surface. Alternatively, the T cell can express a substantially impaired TCR, e.g., by expression of mutated or truncated forms of one or more of the subunits of the TCR. The term “substantially impaired TCR” means that this TCR will not elicit an adverse immune reaction in a host.

[0852] A T cell described herein can be, e.g., engineered such that it does not express a functional HLA on its surface. For example, a T cell described herein, can be engineered such that cell surface expression HLA, e.g., HLA class 1 and/or HLA class II, is downregulated.

[0853] In some embodiments, the T cell can lack a functional TCR and a functional HLA, e.g., HLA class I and/or HLA class II.

[0854] Modified T cells that lack expression of a functional TCR and/or HLA can be obtained by any suitable means, including a knock out or knock down of one or more subunit of TCR or HLA. For example, the T cell can include a knock down of TCR and/or HLA using siRNA, shRNA, clustered regularly interspaced short palindromic repeats (CRISPR) transcription-activator like effector nuclease (TALEN), or zinc finger endonuclease (ZFN).

[0855] In some embodiments, the allogeneic cell can be a cell which does not express or expresses at low levels an inhibitory molecule, e.g. by any method described herein. For example, the cell can be a cell that does not express or expresses at low levels an inhibitory molecule, e.g., that can decrease the ability of a CAR-expressing cell to mount an immune effector response. Examples of inhibitory molecules include PD1, PD-L1, CTLA4, TIM3, CEACAM (e.g., CEACAM-1, CEACAM-3 and/or CEACAM-5), LAG3, VISTA, BTLA, TIGIT, LAIR1, CD160, 2B4 and TGF beta. Inhibition of an inhibitory molecule, e.g., by inhibition at the DNA, RNA or protein level, can optimize a CAR-expressing cell performance In embodiments, an inhibitory nucleic acid, e.g., an inhibitory nucleic acid, e.g., a dsRNA, e.g., an siRNA or shRNA, a clustered regularly interspaced short palindromic repeats (CRISPR), a transcription-activator like effector nuclease (TALEN), or a zinc finger endonuclease (ZFN), e.g., as described herein, can be used.

siRNA and shRNA to Inhibit TCR or HLA

[0856] In some embodiments, TCR expression and/or HLA expression can be inhibited using siRNA or shRNA that targets a nucleic acid encoding a TCR and/or HLA in a T cell.

[0857] Expression of siRNA and shRNAs in T cells can be achieved using any conventional expression system, e.g., such as a lentiviral expression system.

[0858] Exemplary shRNAs that downregulate expression of components of the TCR are described, e.g., in US Publication No.: 2012/0321667. Exemplary siRNA and shRNA that downregulate expression of HLA class I and/or HLA class II genes are described, e.g., in U.S. publication No.: US 2007/0036773.

### CRISPR to Inhibit TCR or HLA

[0859] “CRISPR” or “CRISPR to TCR and/or HLA” or “CRISPR to inhibit TCR and/or HLA” as used herein refers to a set of clustered regularly interspaced short palindromic repeats, or a system comprising such a set of repeats. “Cas”, as used herein, refers to a CRISPR-associated protein. A “CRISPR/Cas” system refers to a system derived from CRISPR and Cas which can be used to silence or mutate a TCR and/or HLA gene.

[0860] Naturally-occurring CRISPR/Cas systems are found in approximately 40% of sequenced eubacteria genomes and 90% of sequenced archaea. Grissa et al. (2007) BMC Bioinformatics 8: 172. This system is a type of prokaryotic immune system that confers resistance to foreign genetic elements such as plasmids and phages and provides a form of acquired immunity. Barrangou et al. (2007) Science 315: 1709-1712; Marragini et al. (2008) Science 322: 1843-1845.

[0861] The CRISPR/Cas system has been modified for use in gene editing (silencing, enhancing or changing specific genes) in eukaryotes such as mice or primates. Wiedenheft et al. (2012) Nature 482: 331-8. This is accomplished by introducing into the eukaryotic cell a plasmid containing a specifically designed CRISPR and one or more appropriate Cas.

[0862] The CRISPR sequence, sometimes called a CRISPR locus, comprises alternating repeats and spacers. In a naturally-occurring CRISPR, the spacers usually comprise sequences foreign to the bacterium such as a plasmid or phage sequence; in the TCR and/or HLA CRISPR/Cas system, the spacers are derived from the TCR or HLA gene sequence.

[0863] RNA from the CRISPR locus is constitutively expressed and processed by Cas proteins into small RNAs. These comprise a spacer flanked by a repeat sequence. The RNAs guide other Cas proteins to silence exogenous genetic elements at the RNA or DNA level. Horvath et al. (2010) Science 327: 167-170; Makarova et al. (2006) Biology Direct 1: 7. The spacers thus serve as templates for RNA molecules, analogously to siRNAs. Pennisi (2013) Science 341: 833-836.

[0864] As these naturally occur in many different types of bacteria, the exact arrangements of the CRISPR and structure, function and number of Cas genes and their product differ somewhat from species to species. Haft et al. (2005) PLoS Comput. Biol. 1: e60; Kunin et al. (2007) Genome Biol. 8: R61; Mojica et al. (2005) J. Mol. Evol. 60: 174-182; Bolotin et al. (2005) Microbiol. 151: 2551-2561; Pourcel et al. (2005) Microbiol. 151: 653-663; and Stern et al. (2010) Trends. Genet. 28: 335-340. For example, the Cse (Cas subtype, E. coli) proteins (e.g., CasA) form a functional complex, Cascade, that processes CRISPR RNA transcripts into spacer-repeat units that Cascade retains. Brouns et al. (2008) Science 321: 960-964. In other prokaryotes, Cas6 processes the CRISPR transcript. The CRISPR-based phage inactivation in E. coli requires Cascade and Cas3, but not Cas1 or Cas2. The Cmr (Cas RAMP module) proteins in Pyrococcus furiosus and other prokaryotes form a functional complex with small CRISPR RNAs that recognizes and cleaves complementary target RNAs. A simpler CRISPR system relies on the protein Cas9, which is a nuclease with two active cutting sites, one for each strand of the double helix. Combining Cas9 and modified CRISPR locus RNA can be used in a system for gene editing. Pennisi (2013) Science 341: 833-836.

[0865] The CRISPR/Cas system can thus be used to edit a TCR and/or HLA gene (adding or deleting a basepair), or introducing a premature stop which thus decreases expression of a TCR and/or HLA. The CRISPR/Cas system can alternatively be used like RNA interference, turning off TCR and/or HLA gene in a reversible fashion. In a mammalian cell, for example, the RNA can guide the Cas protein to a TCR and/or HLA promoter, sterically blocking RNA polymerases.

[0866] Artificial CRISPR/Cas systems can be generated which inhibit TCR and/or HLA, using technology known in the art, e.g., that described in U.S. Publication No. 20140068797, and Cong (2013) Science 339: 819-823. Other artificial CRISPR/Cas systems that are known in the art may also be generated which inhibit TCR and/or HLA, e.g., that described in Tsai (2014) Nature Biotechnol., 32:6 569-576, U.S. Pat. Nos. 8,871,445; 8,865,406; 8,795,965; 8,771,945; and 8,697,359.

TALEN to Inhibit TCR and/or HLA

[0867] “TALEN” or “TALEN to HLA and/or TCR” or “TALEN to inhibit HLA and/or TCR” refers to a transcription activator-like effector nuclease, an artificial nuclease which can be used to edit the HLA and/or TCR gene.

[0868] TALENs are produced artificially by fusing a TAL effector DNA binding domain to a DNA cleavage domain. Transcription activator-like effects (TALEs) can be engineered to bind any desired DNA sequence, including a portion of the HLA or TCR gene. By combining an engineered TALE with a DNA cleavage domain, a restriction enzyme can be produced which is specific to any desired DNA sequence, including a HLA or TCR sequence. These can then be introduced into a cell, wherein they can be used for genome editing. Boch (2011) Nature Biotech. 29: 135-6; and Boch et al. (2009) Science 326: 1509-12; Moscou et al. (2009) Science 326: 3501.

[0869] TALEs are proteins secreted by Xanthomonas bacteria. The DNA binding domain contains a repeated, highly conserved 33-34 amino acid sequence, with the exception of the 12th and 13th amino acids. These two positions are highly variable, showing a strong correlation with specific nucleotide recognition. They can thus be engineered to bind to a desired DNA sequence.

[0870] To produce a TALEN, a TALE protein is fused to a nuclease (N), which is a wild-type or mutated Fold endonuclease. Several mutations to FokI have been made for its use in TALENs; these, for example, improve cleavage specificity or activity. Cermak et al. (2011) Nucl. Acids Res. 39: e82; Miller et al. (2011) Nature Biotech. 29: 143-8; Hockemeyer et al. (2011) Nature Biotech. 29: 731-734; Wood et al. (2011) Science 333: 307; Doyon et al. (2010) Nature Methods 8: 74-79; Szczepek et al. (2007) Nature Biotech. 25: 786-793; and Guo et al. (2010) J. Mol. Biol. 200: 96.

[0871] The FokI domain functions as a dimer, requiring two constructs with unique DNA binding domains for sites in the target genome with proper orientation and spacing. Both the number of amino acid residues between the TALE DNA binding domain and the FokI cleavage domain and the number of bases between the two individual TALEN binding sites appear to be important parameters for achieving high levels of activity. Miller et al. (2011) Nature Biotech. 29: 143-8.

[0872] A HLA or TCR TALEN can be used inside a cell to produce a double-stranded break (DSB). A mutation can be introduced at the break site if the repair mechanisms improperly repair the break via non-homologous end joining. For example, improper repair may introduce a frame shift mutation. Alternatively, foreign DNA can be introduced into the cell along with the TALEN; depending on the sequences of the foreign DNA and chromosomal sequence, this process can be used to correct a defect in the HLA or TCR gene or introduce such a defect into a wt HLA or TCR gene, thus decreasing expression of HLA or TCR.

[0873] TALENs specific to sequences in HLA or TCR can be constructed using any method known in the art, including various schemes using modular components. Zhang et al. (2011) Nature Biotech. 29: 149-53; Geibler et al. (2011) PLoS ONE 6: e19509.

Zinc Finger Nuclease to Inhibit HLA and/or TCR

[0874] “ZFN” or “Zinc Finger Nuclease” or “ZFN to HLA and/or TCR” or “ZFN to inhibit HLA and/or TCR” refer to a zinc finger nuclease, an artificial nuclease which can be used to edit the HLA and/or TCR gene.

[0875] Like a TALEN, a ZFN comprises a Fold nuclease domain (or derivative thereof) fused to a DNA-binding domain. In the case of a ZFN, the DNA-binding domain comprises one or more zinc fingers. Carroll et al. (2011) Genetics Society of America 188: 773-782; and Kim et al. (1996) Proc. Natl. Acad. Sci. USA 93: 1156-1160.

[0876] A zinc finger is a small protein structural motif stabilized by one or more zinc ions. A zinc finger can comprise, for example, Cys2His2, and can recognize an approximately 3-bp sequence. Various zinc fingers of known specificity can be combined to produce multi-finger polypeptides which recognize about 6, 9, 12, 15 or 18-bp sequences. Various selection and modular assembly techniques are available to generate zinc fingers (and combinations thereof) recognizing specific sequences, including phage display, yeast one-hybrid systems, bacterial one-hybrid and two-hybrid systems, and mammalian cells.

[0877] Like a TALEN, a ZFN must dimerize to cleave DNA. Thus, a pair of ZFNs are required to target non-palindromic DNA sites. The two individual ZFNs must bind opposite strands of the DNA with their nucleases properly spaced apart. Bitinaite et al. (1998) Proc. Natl. Acad. Sci. USA 95: 10570-5.

[0878] Also like a TALEN, a ZFN can create a double-stranded break in the DNA, which can create a frame-shift mutation if improperly repaired, leading to a decrease in the expression and amount of HLA and/or TCR in a cell. ZFNs can also be used with homologous recombination to mutate in the HLA or TCR gene.

[0879] ZFNs specific to sequences in HLA AND/OR TCR can be constructed using any method known in the art. See, e.g., Provasi (2011) Nature Med. 18: 807-815; Torikai (2013) Blood 122: 1341-1349; Cathomen et al. (2008) Mol. Ther. 16: 1200-7; Guo et al. (2010) J. Mol. Biol. 400: 96; U.S. Patent Publication 2011/0158957; and U.S. Patent Publication 2012/0060230.

### Telomerase Expression

[0880] While not wishing to be bound by any particular theory, in some embodiments, a therapeutic T cell has short term persistence in a patient, due to shortened telomeres in the T cell; accordingly, transfection with a telomerase gene can lengthen the telomeres of the T cell and improve persistence of the T cell in the patient. See Carl June, “Adoptive T cell therapy for cancer in the clinic”, Journal of Clinical Investigation, 117:1466-1476 (2007). Thus, in an embodiment, an immune effector cell, e.g., a T cell, ectopically expresses a telomerase subunit, e.g., the catalytic subunit of telomerase, e.g., TERT, e.g., hTERT. In some aspects, this disclosure provides a method of producing a CAR-expressing cell, comprising contacting a cell with a nucleic acid encoding a telomerase subunit, e.g., the catalytic subunit of telomerase, e.g., TERT, e.g., hTERT. The cell may be contacted with the nucleic acid before, simultaneous with, or after being contacted with a construct encoding a CAR.

[0881] In one aspect, the disclosure features a method of making a population of immune effector cells (e.g., T cells, NK cells). In an embodiment, the method comprises: providing a population of immune effector cells (e.g., T cells or NK cells), contacting the population of immune effector cells with a nucleic acid encoding a CAR; and contacting the population of immune effector cells with a nucleic acid encoding a telomerase subunit, e.g., hTERT, under conditions that allow for CAR and telomerase expression.

[0882] In an embodiment, the nucleic acid encoding the telomerase subunit is DNA. In an embodiment, the nucleic acid encoding the telomerase subunit comprises a promoter capable of driving expression of the telomerase subunit.

[0883] In an embodiment, hTERT has the amino acid sequence of GenBank Protein ID AAC51724.1 (Meyerson et al., “hEST2, the Putative Human Telomerase Catalytic Subunit Gene, Is Up-Regulated in Tumor Cells and during Immortalization” Cell Volume 90, Issue 4, 22 Aug. 1997, Pages 785-795) as follows:

(SEQ ID NO: 61)

MPRAPRCRAVRSLLRSHYREVLPLATFVRRLGPQGWRLVQRGDPAAFRA
LVAQCLVCVPWDARPPPAAPSFRQVSCLKELVARVLQRLCERGAKNVLA
FGFALLDGARGGPPEAFTTSVRSYLPNTVTDALRGSGAWGLLLRRVGDD
VLVHLLARCALFVLVAPSCAYQVCGPPLYQLGAATQARPPPHASGPRRR
LGCERAWNHSVREAGVPLGLPAPGARRRGGSASRSLPLPKRPRRGAAPE
PERTPVGQGSWAHPGRTRGPSDRGFCVVSPARPAEEATSLEGALSGTRH
SHPSVGRQHHAGPPSTSRPPRPWDTPCPPVYAETKHFLYSSGDKEQLRP
SFLLSSLRPSLTGARRLVETIFLGSRPWMPGTPRRLPRLPQRYWQMRPL
FLELLGNHAQCPYGVLLKTHCPLRAAVTPAAGVCAREKPQGSVAAPEEE
DTDPRRLVQLLRQHSSPWQVYGFVRACLRRLVPPGLWGSRHNERRFLRN
TKKFISLGKHAKLSLQELTWKMSVRGCAWLRRSPGVGCVPAAEHRLREE
ILAKFLHWLMSVYVVELLRSFFYVTETTFQKNRLFFYRKSVWSKLQSIG
IRQHLKRVQLRELSEAEVRQHREARPALLTSRLRFIPKPDGLRPIVNMD
YVVGARTFRREKRAERLTSRVKALFSVLNYERARRPGLLGASVLGLDDI
HRAWRTFVLRVRAQDPPPELYFVKVDVTGAYDTIPQDRLTEVIASIIKP
QNTYCVRRYAVVQKAAHGHVRKAFKSHVSTLTDLQPYMRQFVAHLQETS
PLRDAVVIEQSSSLNEASSGLFDVFLRFMCHHAVRIRGKSYVQCQGIPQ
GSILSTLLCSLCYGDMENKLFAGIRRDGLLLRLVDDFLLVTPHLTHAKT
FLRTLVRGVPEYGCVVNLRKTVVNFPVEDEALGGTAFVQMPAHGLFPWC
GLLLDTRTLEVQSDYSSYARTSIRASLTFNRGFKAGRNMRRKLFGVLRL
KCHSLFLDLQVNSLQTVCTNIYKILLLQAYRFHACVLQLPFHQQVWKNP
TFFLRVISDTASLCYSILKAKNAGMSLGAKGAAGPLPSEAVQWLCHQAF
LLKLTRHRVTYVPLLGSLRTAQTQLSRKLPGTTLTALEAAANPALPSDF
KTILD

[0884] In an embodiment, the hTERT has a sequence at least 80%, 85%, 90%, 95%, 96\hat{ }, 97%, 98%, or 99% identical to the sequence of SEQ ID NO: 61. In an embodiment, the hTERT has a sequence of SEQ ID NO: 61. In an embodiment, the hTERT comprises a deletion (e.g., of no more than 5, 10, 15, 20, or 30 amino acids) at the N-terminus, the C-terminus, or both. In an embodiment, the hTERT comprises a transgenic amino acid sequence (e.g., of no more than 5, 10, 15, 20, or 30 amino acids) at the N-terminus, the C-terminus, or both.

[0885] In an embodiment, the hTERT is encoded by the nucleic acid sequence of GenBank Accession No. AF018167 (Meyerson et al., “hEST2, the Putative Human Telomerase Catalytic Subunit Gene, Is Up-Regulated in Tumor Cells and during Immortalization” Cell Volume 90, Issue 4, 22 Aug. 1997, Pages 785-795):

| (SEQ ID NO: 62) | |
|---|---|
| 1 | caggcagcgt ggtcctgctg cgcacgtggg aagccctggc cccggccacc cccgcgatgc |
| 61 | cgcgcgctcc ccgctgccga gccgtgcgct ccctgctgcg cagccactac cgcgaggtgc |
| 121 | tgccgctggc cacgttcgtg cggcgcctgg ggccccaggg ctggcggctg gtgcagcgcg |
| 181 | gggacccggc ggctttccgc gcgctggtgg cccagtgcct ggtgtgcgtg ccctgggacg |
| 241 | cacggccgcc ccccgccgcc ccctccttcc gccaggtgtc ctgcctgaag gagctggtgg |
| 301 | cccgagtgct gcagaggctg tgcgagcgcg gcgcgaagaa cgtgctggcc ttcggcttcg |
| 361 | cgctgctgga cggggcccgc gggggccccc ccgaggcctt caccaccagc gtgcgcagct |
| 421 | acctgcccaa cacggtgacc gacgcactgc gggggagcgg ggcgtggggg ctgctgttgc |
| 481 | gccgcgtggg cgacgacgtg ctggttcacc tgctggcacg ctgcgcgctc tttgtgctgg |
| 541 | tggctcccag ctgcgcctac caggtgtgcg ggccgccgct gtaccagctc ggcgctgcca |
| 601 | ctcaggcccg gcccccgcca cacgctagtg gaccccgaag gcgtctggga tgcgaacggg |
| 661 | cctggaacca tagcgtcagg gaggccgggg tccccctggg cctgccagcc ccgggtgcga |
| 721 | ggaggcgcgg gggcagtgcc agccgaagtc tgccgttgcc caagaggccc aggcgtggcg |
| 781 | ctgcccctga gccggagcgg acgcccgttg ggcaggggtc ctgggcccac ccgggcagga |
| 841 | cgcgtggacc gagtgaccgt ggtttctgtg tggtgtcacc tgccagaccc gccgaagaag |
| 901 | ccacctcttt ggagggtgcg ctctctggca cgcgccactc ccacccatcc gtgggccgcc |
| 961 | agcaccacgc gggcccccca tccacatcgc ggccaccacg tccctgggac acgccttgtc |
| 1021 | ccccggtgta cgccgagacc aagcacttcc tctactcctc aggcgacaag gagcagctgc |
| 1081 | ggccctcctt cctactcagc tctctgaggc ccagcctgac tggcgctcgg aggctcgtgg |
| 1141 | agaccatctt tctgggttcc aggccctgga tgccagggac tccccgcagg ttgccccgcc |
| 1201 | tgccccagcg ctactggcaa atgcggcccc tgtttctgga gctgcttggg aaccacgcgc |
| 1261 | agtgccccta cggggtgctc ctcaagacgc actgcccgct gcgagctgcg gtcaccccag |
| 1321 | cagccggtgt ctgtgcccgg gagaagcccc agggctctgt ggcggccccc gaggaggagg |
| 1381 | acacagaccc ccgtcgcctg gtgcagctgc tccgccagca cagcagcccc tggcaggtgt |
| 1441 | acggcttcgt gcgggcctgc ctgcgccggc tggtgccccc aggcctctgg ggctccaggc |
| 1501 | acaacgaacg ccgcttcctc aggaacacca agaagttcat ctccctgggg aagcatgcca |
| 1561 | agctctcgct gcaggagctg acgtggaaga tgagcgtgcg gggctgcgct tggctgcgca |
| 1621 | ggagcccagg ggttggctgt gttccggccg cagagcaccg tctgcgtgag gagatcctgg |
| 1681 | ccaagttcct gcactggctg atgagtgtgt acgtcgtcga gctgctcagg tctttctttt |
| 1741 | atgtcacgga gaccacgttt caaaagaaca ggctcttttt ctaccggaag agtgtctgga |
| 1801 | gcaagttgca aagcattgga atcagacagc acttgaagag ggtgcagctg cgggagctgt |
| 1861 | cggaagcaga ggtcaggcag catcgggaag ccaggcccgc cctgctgacg tccagactcc |
| 1921 | gcttcatccc caagcctgac gggctgcggc cgattgtgaa catggactac gtcgtgggag |
| 1981 | ccagaacgtt ccgcagagaa aagagggccg agcgtctcac ctcgagggtg aaggcactgt |
| 2041 | tcagcgtgct caactacgag cgggcgcggc gccccggcct cctgggcgcc tctgtgctgg |
| 2101 | gcctggacga tatccacagg gcctggcgca ccttcgtgct gcgtgtgcgg gcccaggacc |
| 2161 | cgccgcctga gctgtacttt gtcaaggtgg atgtgacggg cgcgtacgac accatccccc |
| 2221 | aggacaggct cacggaggtc atcgccagca tcatcaaacc ccagaacacg tactgcgtgc |
| 2281 | gtcggtatgc cgtggtccag aaggccgccc atgggcacgt ccgcaaggcc ttcaagagcc |
| 2341 | acgtctctac cttgacagac ctccagccgt acatgcgaca gttcgtggct cacctgcagg |
| 2401 | agaccagccc gctgagggat gccgtcgtca tcgagcagag ctcctccctg aatgaggcca |
| 2461 | gcagtggcct cttcgacgtc ttcctacgct tcatgtgcca ccacgccgtg cgcatcaggg |
| 2521 | gcaagtccta cgtccagtgc caggggatcc cgcagggctc catcctctcc acgctgctct |
| 2581 | gcagcctgtg ctacggcgac atggagaaca agctgtttgc ggggattcgg cgggacgggc |
| 2641 | tgctcctgcg tttggtggat gatttcttgt tggtgacacc tcacctcacc cacgcgaaaa |
| 2701 | ccttcctcag gaccctggtc cgaggtgtcc ctgagtatgg ctgcgtggtg aacttgcgga |
| 2761 | agacagtggt gaacttccct gtagaagacg aggccctggg tggcacggct tttgttcaga |
| 2821 | tgccggccca cggcctattc ccctggtgcg gcctgctgct ggatacccgg accctggagg |
| 2881 | tgcagagcga ctactccagc tatgcccgga cctccatcag agccagtctc accttcaacc |
| 2941 | gcggcttcaa ggctgggagg aacatgcgtc gcaaactctt tggggtcttg cggctgaagt |
| 3001 | gtcacagcct gtttctggat ttgcaggtga acagcctcca gacggtgtgc accaacatct |
| 3061 | acaagatcct cctgctgcag gcgtacaggt ttcacgcatg tgtgctgcag ctcccatttc |
| 3121 | atcagcaagt ttggaagaac cccacatttt tcctgcgcgt catctctgac acggcctccc |
| 3181 | tctgctactc catcctgaaa gccaagaacg cagggatgtc gctgggggcc aagggcgccg |
| 3241 | ccggccctct gccctccgag gccgtgcagt ggctgtgcca ccaagcattc ctgctcaagc |
| 3301 | tgactcgaca ccgtgtcacc tacgtgccac tcctggggtc actcaggaca gcccagacgc |
| 3361 | agctgagtcg gaagctcccg gggacgacgc tgactgccct ggaggccgca gccaacccgg |
| 3421 | cactgccctc agacttcaag accatcctgg actgatggcc acccgcccac agccaggccg |
| 3481 | agagcagaca ccagcagccc tgtcacgccg ggctctacgt cccagggagg gaggggcggc |
| 3541 | ccacacccag gcccgcaccg ctgggagtct gaggcctgag tgagtgtttg gccgaggcct |
| 3601 | gcatgtccgg ctgaaggctg agtgtccggc tgaggcctga gcgagtgtcc agccaagggc |
| 3661 | tgagtgtcca gcacacctgc cgtcttcact tccccacagg ctggcgctcg gctccacccc |
| 3721 | agggccagct tttcctcacc aggagcccgg cttccactcc ccacatagga atagtccatc |
| 3781 | cccagattcg ccattgttca cccctcgccc tgccctcctt tgccttccac ccccaccatc |
| 3841 | caggtggaga ccctgagaag gaccctggga gctctgggaa tttggagtga ccaaaggtgt |
| 3901 | gccctgtaca caggcgagga ccctgcacct ggatgggggt ccctgtgggt caaattgggg |
| 3961 | ggaggtgctg tgggagtaaa atactgaata tatgagtttt tcagttttga aaaaaaaaaa |
| 4021 | aaaaaaa |

[0886] In an embodiment, the hTERT is encoded by a nucleic acid having a sequence at least 80%, 85%, 90%, 95%, 96, 97%, 98%, or 99% identical to the sequence of SEQ ID NO: 62. In an embodiment, the hTERT is encoded by a nucleic acid of SEQ ID NO: 62.

### Activation and Expansion of Immune Effector Cells (e.g., T Cells)

[0887] Immune effector cells such as T cells may be activated and expanded generally using methods as described, for example, in U.S. Pat. Nos. 6,352,694; 6,534,055; 6,905,680; 6,692,964; 5,858,358; 6,887,466; 6,905,681; 7,144,575; 7,067,318; 7,172,869; 7,232,566; 7,175,843; 5,883,223; 6,905,874; 6,797,514; 6,867,041; and U.S. Patent Application Publication No. 20060121005.

[0888] As demonstrated by the data disclosed herein, expanding the T cells by the methods disclosed herein can multiply the cells by about 10 fold, 20 fold, 30 fold, 40 fold, 50 fold, 60 fold, 70 fold, 80 fold, 90 fold, 100 fold, 200 fold, 300 fold, 400 fold, 500 fold, 600 fold, 700 fold, 800 fold, 900 fold, 1000 fold, 2000 fold, 3000 fold, 4000 fold, 5000 fold, 6000 fold, 7000 fold, 8000 fold, 9000 fold, 10,000 fold, 100,000 fold, 1,000,000 fold, 10,000,000 fold, or greater, and any and all whole or partial integers therebetween. In one embodiment, the T cells expand in the range of about 20 fold to about 50 fold.

[0889] Generally, a population of immune effector cells e.g., T regulatory cell depleted cells, may be expanded by contact with a surface having attached thereto an agent that stimulates a CD3/TCR complex associated signal and a ligand that stimulates a costimulatory molecule on the surface of the T cells. In particular, T cell populations may be stimulated as described herein, such as by contact with an anti-CD3 antibody, or antigen-binding fragment thereof, or an anti-CD2 antibody immobilized on a surface, or by contact with a protein kinase C activator (e.g., bryostatin) in conjunction with a calcium ionophore. For co-stimulation of an accessory molecule on the surface of the T cells, a ligand that binds the accessory molecule is used. For example, a population of T cells can be contacted with an anti-CD3 antibody and an anti-CD28 antibody, under conditions appropriate for stimulating proliferation of the T cells. To stimulate proliferation of either CD4+ T cells or CD8+ T cells, an anti-CD3 antibody and an anti-CD28 antibody can be used. Examples of an anti-CD28 antibody include 9.3, B-T3, XR-CD28 (Diaclone, Besançon, France) can be used as can other methods commonly known in the art (Berg et al., Transplant Proc. 30(8):3975-3977, 1998; Haanen et al., J. Exp. Med. 190(9):13191328, 1999; Garland et al., J. Immunol Meth. 227(1-2):53-63, 1999).

[0890] In certain aspects, the primary stimulatory signal and the costimulatory signal for the T cell may be provided by different protocols. For example, the agents providing each signal may be in solution or coupled to a surface. When coupled to a surface, the agents may be coupled to the same surface (i.e., in “cis” formation) or to separate surfaces (i.e., in “trans” formation). Alternatively, one agent may be coupled to a surface and the other agent in solution. In one aspect, the agent providing the costimulatory signal is bound to a cell surface and the agent providing the primary activation signal is in solution or coupled to a surface. In certain aspects, both agents can be in solution. In one aspect, the agents may be in soluble form, and then cross-linked to a surface, such as a cell expressing Fc receptors or an antibody or other binding agent which will bind to the agents. In this regard, see for example, U.S. Patent Application Publication Nos. 20040101519 and 20060034810 for artificial antigen presenting cells (aAPCs) that are contemplated for use in activating and expanding T cells in the present invention.

[0891] In one aspect, the two agents are immobilized on beads, either on the same bead, i.e., “cis,” or to separate beads, i.e., “trans.” By way of example, the agent providing the primary activation signal is an anti-CD3 antibody or an antigen-binding fragment thereof and the agent providing the costimulatory signal is an anti-CD28 antibody or antigen-binding fragment thereof; and both agents are co-immobilized to the same bead in equivalent molecular amounts. In one aspect, a 1:1 ratio of each antibody bound to the beads for CD4+ T cell expansion and T cell growth is used. In certain aspects of the present invention, a ratio of anti CD3:CD28 antibodies bound to the beads is used such that an increase in T cell expansion is observed as compared to the expansion observed using a ratio of 1:1. In one particular aspect an increase of from about 1 to about 3 fold is observed as compared to the expansion observed using a ratio of 1:1. In one aspect, the ratio of CD3:CD28 antibody bound to the beads ranges from 100:1 to 1:100 and all integer values there between. In one aspect, more anti-CD28 antibody is bound to the particles than anti-CD3 antibody, i.e., the ratio of CD3:CD28 is less than one. In certain aspects, the ratio of anti CD28 antibody to anti CD3 antibody bound to the beads is greater than 2:1. In one particular aspect, a 1:100 CD3:CD28 ratio of antibody bound to beads is used. In one aspect, a 1:75 CD3:CD28 ratio of antibody bound to beads is used. In a further aspect, a 1:50 CD3:CD28 ratio of antibody bound to beads is used. In one aspect, a 1:30 CD3:CD28 ratio of antibody bound to beads is used. In one preferred aspect, a 1:10 CD3:CD28 ratio of antibody bound to beads is used. In one aspect, a 1:3 CD3:CD28 ratio of antibody bound to the beads is used. In yet one aspect, a 3:1 CD3:CD28 ratio of antibody bound to the beads is used.

[0892] Ratios of particles to cells from 1:500 to 500:1 and any integer values in between may be used to stimulate T cells or other target cells. As those of ordinary skill in the art can readily appreciate, the ratio of particles to cells may depend on particle size relative to the target cell. For example, small sized beads could only bind a few cells, while larger beads could bind many In certain aspects the ratio of cells to particles ranges from 1:100 to 100:1 and any integer values in-between and in further aspects the ratio comprises 1:9 to 9:1 and any integer values in between, can also be used to stimulate T cells. The ratio of anti-CD3- and anti-CD28-coupled particles to T cells that result in T cell stimulation can vary as noted above, however certain preferred values include 1:100, 1:50, 1:40, 1:30, 1:20, 1:10, 1:9, 1:8, 1:7, 1:6, 1:5, 1:4, 1:3, 1:2, 1:1, 2:1, 3:1, 4:1, 5:1, 6:1, 7:1, 8:1, 9:1, 10:1, and 15:1 with one preferred ratio being at least 1:1 particles per T cell. In one aspect, a ratio of particles to cells of 1:1 or less is used. In one particular aspect, a preferred particle: cell ratio is 1:5. In further aspects, the ratio of particles to cells can be varied depending on the day of stimulation. For example, in one aspect, the ratio of particles to cells is from 1:1 to 10:1 on the first day and additional particles are added to the cells every day or every other day thereafter for up to 10 days, at final ratios of from 1:1 to 1:10 (based on cell counts on the day of addition). In one particular aspect, the ratio of particles to cells is 1:1 on the first day of stimulation and adjusted to 1:5 on the third and fifth days of stimulation. In one aspect, particles are added on a daily or every other day basis to a final ratio of 1:1 on the first day, and 1:5 on the third and fifth days of stimulation. In one aspect, the ratio of particles to cells is 2:1 on the first day of stimulation and adjusted to 1:10 on the third and fifth days of stimulation. In one aspect, particles are added on a daily or every other day basis to a final ratio of 1:1 on the first day, and 1:10 on the third and fifth days of stimulation. One of skill in the art will appreciate that a variety of other ratios may be suitable for use in the present invention. In particular, ratios will vary depending on particle size and on cell size and type. In one aspect, the most typical ratios for use are in the neighborhood of 1:1, 2:1 and 3:1 on the first day.

[0893] In further aspects, the cells, such as T cells, are combined with agent-coated beads, the beads and the cells are subsequently separated, and then the cells are cultured. In an alternative aspect, prior to culture, the agent-coated beads and cells are not separated but are cultured together. In a further aspect, the beads and cells are first concentrated by application of a force, such as a magnetic force, resulting in increased ligation of cell surface markers, thereby inducing cell stimulation.

[0894] By way of example, cell surface proteins may be ligated by allowing paramagnetic beads to which anti-CD3 and anti-CD28 are attached (3×28 beads) to contact the T cells. In one aspect the cells (for example, 10⁴ to 10⁹ T cells) and beads (for example, DYNABEADS® M-450 CD3/CD28 T paramagnetic beads at a ratio of 1:1) are combined in a buffer, for example PBS (without divalent cations such as, calcium and magnesium). Again, those of ordinary skill in the art can readily appreciate any cell concentration may be used. For example, the target cell may be very rare in the sample and comprise only 0.01% of the sample or the entire sample (i.e., 100%) may comprise the target cell of interest. Accordingly, any cell number is within the context of the present invention. In certain aspects, it may be desirable to significantly decrease the volume in which particles and cells are mixed together (i.e., increase the concentration of cells), to ensure maximum contact of cells and particles. For example, in one aspect, a concentration of about 10 billion cells/ml, 9 billion/ml, 8 billion/ml, 7 billion/ml, 6 billion/ml, 5 billion/ml, or 2 billion cells/ml is used. In one aspect, greater than 100 million cells/ml is used. In a further aspect, a concentration of cells of 10, 15, 20, 25, 30, 35, 40, 45, or 50 million cells/ml is used. In yet one aspect, a concentration of cells from 75, 80, 85, 90, 95, or 100 million cells/ml is used. In further aspects, concentrations of 125 or 150 million cells/ml can be used. Using high concentrations can result in increased cell yield, cell activation, and cell expansion. Further, use of high cell concentrations allows more efficient capture of cells that may weakly express target antigens of interest, such as CD28-negative T cells. Such populations of cells may have therapeutic value and would be desirable to obtain in certain aspects. For example, using high concentration of cells allows more efficient selection of CD8+ T cells that normally have weaker CD28 expression.

[0895] In one embodiment, cells transduced with a nucleic acid encoding a CAR, e.g., a CAR described herein, are expanded, e.g., by a method described herein. In one embodiment, the cells are expanded in culture for a period of several hours (e.g., about 2, 3, 4, 5, 6, 7, 8, 9, 10, 15, 18, 21 hours) to about 14 days (e.g., 1, 2, 3, 4, 5, 6, 7, 8, 9, 10, 11, 12, 13 or 14 days). In one embodiment, the cells are expanded for a period of 4 to 9 days. In one embodiment, the cells are expanded for a period of 8 days or less, e.g., 7, 6 or 5 days. In one embodiment, the cells, e.g., a CD19 CAR cell described herein, are expanded in culture for 5 days, and the resulting cells are more potent than the same cells expanded in culture for 9 days under the same culture conditions. Potency can be defined, e.g., by various T cell functions, e.g. proliferation, target cell killing, cytokine production, activation, migration, or combinations thereof. In one embodiment, the cells, e.g., a CD19 CAR cell described herein, expanded for 5 days show at least a one, two, three or four fold increase in cells doublings upon antigen stimulation as compared to the same cells expanded in culture for 9 days under the same culture conditions. In one embodiment, the cells, e.g., the cells expressing a CD19 CAR described herein, are expanded in culture for 5 days, and the resulting cells exhibit higher proinflammatory cytokine production, e.g., IFN-γ and/or GM-CSF levels, as compared to the same cells expanded in culture for 9 days under the same culture conditions. In one embodiment, the cells, e.g., a CD19 CAR cell described herein, expanded for 5 days show at least a one, two, three, four, five, ten fold or more increase in pg/ml of proinflammatory cytokine production, e.g., IFN-γ and/or GM-CSF levels, as compared to the same cells expanded in culture for 9 days under the same culture conditions.

[0896] Several cycles of stimulation may also be desired such that culture time of T cells can be 60 days or more. Conditions appropriate for T cell culture include an appropriate media (e.g., Minimal Essential Media or RPMI Media 1640 or, X-vivo 15, (Lonza)) that may contain factors necessary for proliferation and viability, including serum (e.g., fetal bovine or human serum), interleukin-2 (IL-2), insulin, IFN-γ, IL-4, IL-7, GM-CSF, IL-10, IL-12, IL-15, TGFβ, and TNF-α or any other additives for the growth of cells known to the skilled artisan. Other additives for the growth of cells include, but are not limited to, surfactant, plasmanate, and reducing agents such as N-acetyl-cysteine and 2-mercaptoethanol. Media can include RPMI 1640, AIM-V, DMEM, MEM, α-MEM, F-12, X-Vivo 15, and X-Vivo 20, Optimizer, with added amino acids, sodium pyruvate, and vitamins, either serum-free or supplemented with an appropriate amount of serum (or plasma) or a defined set of hormones, and/or an amount of cytokine(s) sufficient for the growth and expansion of T cells. Antibiotics, e.g., penicillin and streptomycin, are included only in experimental cultures, not in cultures of cells that are to be infused into a subject. The target cells are maintained under conditions necessary to support growth, for example, an appropriate temperature (e.g., 37° C.) and atmosphere (e.g., air plus 5% CO₂).

[0897] In one embodiment, the cells are expanded in an appropriate media (e.g., media described herein) that includes one or more interleukin that result in at least a 200-fold (e.g., 200-fold, 250-fold, 300-fold, 350-fold) increase in cells over a 14 day expansion period, e.g., as measured by a method described herein such as flow cytometry. In one embodiment, the cells are expanded in the presence of IL-15 and/or IL-7 (e.g., IL-15 and IL-7).

[0898] In embodiments, methods described herein, e.g., CAR-expressing cell manufacturing methods, comprise removing T regulatory cells, e.g., CD25+ T cells, from a cell population, e.g., using an anti-CD25 antibody, or fragment thereof, or a CD25-binding ligand, IL-2. Methods of removing T regulatory cells, e.g., CD25+ T cells, from a cell population are described herein. In embodiments, the methods, e.g., manufacturing methods, further comprise contacting a cell population (e.g., a cell population in which T regulatory cells, such as CD25+ T cells, have been depleted; or a cell population that has previously contacted an anti-CD25 antibody, fragment thereof, or CD25-binding ligand) with IL-15 and/or IL-7. For example, the cell population (e.g., that has previously contacted an anti-CD25 antibody, fragment thereof, or CD25-binding ligand) is expanded in the presence of IL-15 and/or IL-7.

[0899] In some embodiments a CAR-expressing cell described herein is contacted with a composition comprising a interleukin-15 (IL-15) polypeptide, a interleukin-15 receptor alpha (IL-15Ra) polypeptide, or a combination of both a IL-15 polypeptide and a IL-15Ra polypeptide e.g., hetIL-15, during the manufacturing of the CAR-expressing cell, e.g., ex vivo. In embodiments, a CAR-expressing cell described herein is contacted with a composition comprising a IL-15 polypeptide during the manufacturing of the CAR-expressing cell, e.g., ex vivo. In embodiments, a CAR-expressing cell described herein is contacted with a composition comprising a combination of both a IL-15 polypeptide and a IL-15 Ra polypeptide during the manufacturing of the CAR-expressing cell, e.g., ex vivo. In embodiments, a CAR-expressing cell described herein is contacted with a composition comprising hetIL-15 during the manufacturing of the CAR-expressing cell, e.g., ex vivo.

[0900] In one embodiment the CAR-expressing cell described herein is contacted with a composition comprising hetIL-15 during ex vivo expansion. In an embodiment, the CAR-expressing cell described herein is contacted with a composition comprising an IL-15 polypeptide during ex vivo expansion. In an embodiment, the CAR-expressing cell described herein is contacted with a composition comprising both an IL-15 polypeptide and an IL-15Ra polypeptide during ex vivo expansion. In one embodiment the contacting results in the survival and proliferation of a lymphocyte subpopulation, e.g., CD8+ T cells.

[0901] T cells that have been exposed to varied stimulation times may exhibit different characteristics. For example, typical blood or apheresed peripheral blood mononuclear cell products have a helper T cell population (TH, CD4+) that is greater than the cytotoxic or suppressor T cell population (TC, CD8+). Ex vivo expansion of T cells by stimulating CD3 and CD28 receptors produces a population of T cells that prior to about days 8-9 consists predominately of TH cells, while after about days 8-9, the population of T cells comprises an increasingly greater population of TC cells. Accordingly, depending on the purpose of treatment, infusing a subject with a T cell population comprising predominately of TH cells may be advantageous. Similarly, if an antigen-specific subset of TC cells has been isolated it may be beneficial to expand this subset to a greater degree.

[0902] Further, in addition to CD4 and CD8 markers, other phenotypic markers vary significantly, but in large part, reproducibly during the course of the cell expansion process. Thus, such reproducibility enables the ability to tailor an activated T cell product for specific purposes.

[0903] Once a CAR described herein is constructed, various assays can be used to evaluate the activity of the molecule, such as but not limited to, the ability to expand T cells following antigen stimulation, sustain T cell expansion in the absence of re-stimulation, and anti-cancer activities in appropriate in vitro and animal models. Assays to evaluate the effects of a cars of the present invention are described in further detail below

[0904] Western blot analysis of CAR expression in primary T cells can be used to detect the presence of monomers and dimers. See, e.g., Milone et al., Molecular Therapy 17(8): 1453-1464 (2009). Very briefly, T cells (1:1 mixture of CD4⁺ and CD8⁺ T cells) expressing the CARs are expanded in vitro for more than 10 days followed by lysis and SDS-PAGE under reducing conditions. CARs containing the full length TCR-ζ cytoplasmic domain and the endogenous TCR-ζ chain are detected by western blotting using an antibody to the TCR-ζ chain. The same T cell subsets are used for SDS-PAGE analysis under non-reducing conditions to permit evaluation of covalent dimer formation.

[0905] In vitro expansion of CAR⁺ T cells following antigen stimulation can be measured by flow cytometry. For example, a mixture of CD4⁺ and CD8⁺ T cells are stimulated with αCD3/αCD28 aAPCs followed by transduction with lentiviral vectors expressing GFP under the control of the promoters to be analyzed. Exemplary promoters include the CMV IE gene, EF-1α, ubiquitin C, or phosphoglycerokinase (PGK) promoters. GFP fluorescence is evaluated on day 6 of culture in the CD4⁺ and/or CD8⁺ T cell subsets by flow cytometry. See, e.g., Milone et al., Molecular Therapy 17(8): 1453-1464 (2009). Alternatively, a mixture of CD4⁺ and CD8⁺ T cells are stimulated with αCD3/αCD28 coated magnetic beads on day 0, and transduced with CAR on day 1 using a bicistronic lentiviral vector expressing CAR along with eGFP using a 2A ribosomal skipping sequence. Cultures are re-stimulated with either a cancer associated antigen as described herein⁺ K562 cells (K562 expressing a cancer associated antigen as described herein), wild-type K562 cells (K562 wild type) or K562 cells expressing hCD32 and 4-1BBL in the presence of antiCD3 and anti-CD28 antibody (K562-BBL-3/28) following washing. Exogenous IL-2 is added to the cultures every other day at 100 IU/ml. GFP⁺ T cells are enumerated by flow cytometry using bead-based counting. See, e.g., Milone et al., Molecular Therapy 17(8): 1453-1464 (2009).

[0906] Sustained CAR⁺ T cell expansion in the absence of re-stimulation can also be measured. See, e.g., Milone et al., Molecular Therapy 17(8): 1453-1464 (2009). Briefly, mean T cell volume (fl) is measured on day 8 of culture using a Coulter Multisizer III particle counter, a Nexcelom Cellometer Vision or Millipore Scepter, following stimulation with αCD3/αCD28 coated magnetic beads on day 0, and transduction with the indicated CAR on day 1.

[0907] Animal models can also be used to measure a CART activity. For example, xenograft model using human a cancer associated antigen described herein-specific CAR⁺ T cells to treat a primary human pre-B ALL in immunodeficient mice can be used. See, e.g., Milone et al., Molecular Therapy 17(8): 1453-1464 (2009). Very briefly, after establishment of ALL, mice are randomized as to treatment groups. Different numbers of a cancer associated antigen-specific CARengineered T cells are coinjected at a 1:1 ratio into NOD-SCID-γ^{-/-} mice bearing B-ALL. The number of copies of a cancer associated antigen-specific CAR vector in spleen DNA from mice is evaluated at various times following T cell injection. Animals are assessed for leukemia at weekly intervals. Peripheral blood a cancer associate antigen as described herein⁺ B-ALL blast cell counts are measured in mice that are injected with a cancer associated antigen described herein-ζ CAR⁺ T cells or mock-transduced T cells. Survival curves for the groups are compared using the log-rank test. In addition, absolute peripheral blood CD4⁺ and CD8⁺ T cell counts 4 weeks following T cell injection in NOD-SCID-γ^{-/-} mice can also be analyzed. Mice are injected with leukemic cells and 3 weeks later are injected with T cells engineered to express CAR by a bicistronic lentiviral vector that encodes the CAR linked to eGFP. T cells are normalized to 45-50% input GFP⁺ T cells by mixing with mock-transduced cells prior to injection, and confirmed by flow cytometry. Animals are assessed for leukemia at 1-week intervals. Survival curves for the CAR⁺ T cell groups are compared using the log-rank test.

[0908] Dose dependent CAR treatment response can be evaluated. See, e.g., Milone et al., Molecular Therapy 17(8): 1453-1464 (2009). For example, peripheral blood is obtained 35-70 days after establishing leukemia in mice injected on day 21 with CAR T cells, an equivalent number of mock-transduced T cells, or no T cells. Mice from each group are randomly bled for determination of peripheral blood a cancer associate antigen as described herein⁺ ALL blast counts and then killed on days 35 and 49. The remaining animals are evaluated on days 57 and 70.

[0909] Assessment of cell proliferation and cytokine production has been previously described, e.g., at Milone et al., Molecular Therapy 17(8): 1453-1464 (2009). Briefly, assessment of CAR-mediated proliferation is performed in microtiter plates by mixing washed T cells with K562 cells expressing a cancer associated antigen described herein (K19) or CD32 and CD137 (KT32-BBL) for a final T-cell:K562 ratio of 2:1. K562 cells are irradiated with gamma-radiation prior to use. Anti-CD3 (clone OKT3) and anti-CD28 (clone 9.3) monoclonal antibodies are added to cultures with KT32-BBL cells to serve as a positive control for stimulating T-cell proliferation since these signals support long-term CD8⁺ T cell expansion ex vivo. T cells are enumerated in cultures using CountBright™ fluorescent beads (Invitrogen, Carlsbad, Calif.) and flow cytometry as described by the manufacturer. CAR⁺ T cells are identified by GFP expression using T cells that are engineered with eGFP-2A linked CAR-expressing lentiviral vectors. For CAR+ T cells not expressing GFP, the CAR+ T cells are detected with biotinylated recombinant a cancer associate antigen as described herein protein and a secondary avidin-PE conjugate. CD4+ and CD8⁺ expression on T cells are also simultaneously detected with specific monoclonal antibodies (BD Biosciences). Cytokine measurements are performed on supernatants collected 24 hours following re-stimulation using the human TH1/TH2 cytokine cytometric bead array kit (BD Biosciences, San Diego, Calif.) according the manufacturer's instructions. Fluorescence is assessed using a FACScalibur flow cytometer, and data is analyzed according to the manufacturer's instructions.

[0910] Cytotoxicity can be assessed by a standard 51Cr-release assay. See, e.g., Milone et al., Molecular Therapy 17(8): 1453-1464 (2009). Briefly, target cells (K562 lines and primary pro-B-ALL cells) are loaded with 51Cr (as NaCrO4, New England Nuclear, Boston, Mass.) at 37° C. for 2 hours with frequent agitation, washed twice in complete RPMI and plated into microtiter plates. Effector T cells are mixed with target cells in the wells in complete RPMI at varying ratios of effector cell:target cell (E:T). Additional wells containing media only (spontaneous release, SR) or a 1% solution of triton-X 100 detergent (total release, TR) are also prepared. After 4 hours of incubation at 37° C., supernatant from each well is harvested. Released 51Cr is then measured using a gamma particle counter (Packard Instrument Co., Waltham, Mass.). Each condition is performed in at least triplicate, and the percentage of lysis is calculated using the formula: % Lysis=(ER−SR)/(TR−SR), where ER represents the average 51Cr released for each experimental condition.

[0911] Imaging technologies can be used to evaluate specific trafficking and proliferation of CARs in tumor-bearing animal models. Such assays have been described, for example, in Barrett et al., Human Gene Therapy 22:1575-1586 (2011). Briefly, NOD/SCID/γc^{-/-} (NSG) mice are injected IV with Nalm-6 cells followed 7 days later with T cells 4 hour after electroporation with the CAR constructs. The T cells are stably transfected with a lentiviral construct to express firefly luciferase, and mice are imaged for bioluminescence. Alternatively, therapeutic efficacy and specificity of a single injection of CAR⁺ T cells in Nalm-6 xenograft model can be measured as the following: NSG mice are injected with Nalm-6 transduced to stably express firefly luciferase, followed by a single tail-vein injection of T cells electroporated with cars of the present invention 7 days later. Animals are imaged at various time points post injection. For example, photon-density heat maps of firefly luciferase positive leukemia in representative mice at day 5 (2 days before treatment) and day 8 (24 hr post CAR⁺ PBLs) can be generated.

[0912] Other assays, including those described in the Example section herein as well as those that are known in the art can also be used to evaluate the CARs described herein.

### Therapeutic Application

[0913] The modified cells described herein may be included in a composition for therapy. In one aspect, the composition comprises a population of modified T cells comprising a nucleic acid sequence encoding a CAR, wherein the CAR comprises a mutant CD28 costimulatory domain. In another aspect, the composition comprises the modified T cell comprising a nucleic acid sequence encoding a CAR, wherein the CAR comprises a mutant CD28 costimulatory domain that increases anti-tumor effect and T cell persistence. In yet another embodiment, the composition includes a modified T cell comprising a CAR that comprises a costimulatory domain described herein, e.g., that increases anti-tumor effect and T cell persistence. The composition may include a pharmaceutical composition and further include a pharmaceutically acceptable carrier. A therapeutically effective amount of the pharmaceutical composition comprising the modified cells may be administered.

[0914] In one aspect, the invention includes a method comprising administering a population of modified T cells to a subject in need thereof to prevent or treat a tumor, wherein the modified T cells comprise a nucleic acid sequence encoding a CAR and a nucleic acid sequence encoding a peptide described herein, e.g., a peptide comprising an amphipathic helix domain and a cluster of basic amino acids, wherein the peptide disrupts PKA and an AKAP association.

[0915] In another aspect, the invention includes a method comprising administering a population of modified cells to a subject in need thereof to prevent or treat a tumor that is adverse to the subject, wherein the modified cells comprise a CAR and a peptide described herein, e.g., a peptide that disrupts PKA and an AKAP binding.

[0916] In one aspect, the invention provides methods for treating a disease associated with expression of a cancer associated antigen described herein.

[0917] In one aspect, the present invention provides methods of treating cancer by providing to the subject in need thereof immune effector cells (e.g., T cells, NK cells) that are engineered to express an XCAR, wherein X represents a tumor antigen as described herein, and wherein the cancer cells express said X tumor antigen.

[0918] In one aspect, the present invention provides methods of treating cancer by providing to the subject in need thereof immune effector cells (e.g., T cells, NK cells) that are engineered to express a XCAR described herein, wherein the cancer cells express X. In one embodiment, X is expressed on both normal cells and cancers cells, but is expressed at lower levels on normal cells. In one embodiment, the method further comprises selecting a CAR that binds X with an affinity that allows the XCAR to bind and kill the cancer cells expressing X but less than 30%, 25%, 20%, 15%, 10%, 5% or less of the normal cells expressing X are killed, e.g., as determined by an assay described herein. In one embodiment, the selected CAR has an antigen binding domain that has a binding affinity KD of 10⁻⁴ M to 10⁻⁸ M, e.g., 10⁻⁵ M to 10⁻⁷ M, e.g., 10⁻⁶ M or 10⁻⁷ M, for the target antigen. In one embodiment, the selected antigen binding domain has a binding affinity that is at least five-fold, 10-fold, 20-fold, 30-fold, 50-fold, 100-fold or 1,000-fold less than a reference antibody, e.g., an antibody described herein.

[0919] In one embodiment, the present invention provides methods of treating cancer by providing to the subject in need thereof immune effector cells (e.g., T cells, NK cells) that are engineered to express CD19 CAR, wherein the cancer cells express CD19. In one embodiment, the cancer to be treated is ALL (acute lymphoblastic leukemia), CLL (chronic lymphocytic leukemia), DLBCL (diffuse large B-cell lymphoma), MCL (Mantle cell lymphoma, or MM (multiple myeloma).

[0920] In one aspect, the present invention provides methods of treating cancer by providing to the subject in need thereof immune effector cells (e.g., T cells, NK cells) that are engineered to express an EGFRvIIICAR, wherein the cancer cells express EGFRvIII. In one embodiment, the cancer to be treated is glioblastoma.

[0921] In one aspect, the present invention provides methods of treating cancer by providing to the subject in need thereof immune effector cells (e.g., T cells, NK cells) that are engineered to express a mesothelinCAR, wherein the cancer cells express mesothelin. In one embodiment, the cancer to be treated is mesothelioma, pancreatic cancer, or ovarian cancer.

[0922] In one aspect, the present invention provides methods of treating cancer by providing to the subject in need thereof immune effector cells (e.g., T cells, NK cells) that are engineered to express a CD123CAR, wherein the cancer cells express CD123. In one embodiment, the cancer to be treated is AML.

[0923] In one aspect, the present invention provides methods of treating cancer by providing to the subject in need thereof immune effector cells (e.g., T cells, NK cells) that are engineered to express a CD22CAR, wherein the cancer cells express CD22. In one embodiment, the cancer to be treated is B cell malignancies.

[0924] In one aspect, the present invention provides methods of treating cancer by providing to the subject in need thereof immune effector cells (e.g., T cells, NK cells) that are engineered to express a CS-1CAR, wherein the cancer cells express CS-1. In one embodiment, the cancer to be treated is multiple myeloma.

[0925] In one aspect, the present invention provides methods of treating cancer by providing to the subject in need thereof immune effector cells (e.g., T cells, NK cells) that are engineered to express a CLL-1CAR, wherein the cancer cells express CLL-1. In one embodiment, the cancer to be treated is AML.

[0926] In one aspect, the present invention provides methods of treating cancer by providing to the subject in need thereof immune effector cells (e.g., T cells, NK cells) that are engineered to express a CD33CAR, wherein the cancer cells express CD33. In one embodiment, the cancer to be treated is AML.

[0927] In one aspect, the present invention provides methods of treating cancer by providing to the subject in need thereof immune effector cells (e.g., T cells, NK cells) that are engineered to express a GD2CAR, wherein the cancer cells express GD2. In one embodiment, the cancer to be treated is neuroblastoma.

[0928] In one aspect, the present invention provides methods of treating cancer by providing to the subject in need thereof immune effector cells (e.g., T cells, NK cells) that are engineered to express a BCMACAR, wherein the cancer cells express BCMA. In one embodiment, the cancer to be treated is multiple myeloma.

[0929] In one aspect, the present invention provides methods of treating cancer by providing to the subject in need thereof immune effector cells (e.g., T cells, NK cells) that are engineered to express a TnCAR, wherein the cancer cells express Tn antigen. In one embodiment, the cancer to be treated is ovarian cancer.

[0930] In one aspect, the present invention provides methods of treating cancer by providing to the subject in need thereof immune effector cells (e.g., T cells, NK cells) that are engineered to express a PSMACAR, wherein the cancer cells express PSMA. In one embodiment, the cancer to be treated is prostate cancer.

[0931] In one aspect, the present invention provides methods of treating cancer by providing to the subject in need thereof immune effector cells (e.g., T cells, NK cells) that are engineered to express a ROR1CAR, wherein the cancer cells express ROR1. In one embodiment, the cancer to be treated is B cell malignancies.

[0932] In one aspect, the present invention provides methods of treating cancer by providing to the subject in need thereof immune effector cells (e.g., T cells, NK cells) that are engineered to express a FLT3 CAR, wherein the cancer cells express FLT3. In one embodiment, the cancer to be treated is AML.

[0933] In one aspect, the present invention provides methods of treating cancer by providing to the subject in need thereof immune effector cells (e.g., T cells, NK cells) that are engineered to express a TAG72CAR, wherein the cancer cells express TAG72. In one embodiment, the cancer to be treated is gastrointestinal cancer.

[0934] In one aspect, the present invention provides methods of treating cancer by providing to the subject in need thereof immune effector cells (e.g., T cells, NK cells) that are engineered to express a CD38CAR, wherein the cancer cells express CD38. In one embodiment, the cancer to be treated is multiple myeloma.

[0935] In one aspect, the present invention provides methods of treating cancer by providing to the subject in need thereof immune effector cells (e.g., T cells, NK cells) that are engineered to express a CD44v6CAR, wherein the cancer cells express CD44v6. In one embodiment, the cancer to be treated is cervical cancer, AML, or MM.

[0936] In one aspect, the present invention provides methods of treating cancer by providing to the subject in need thereof immune effector cells (e.g., T cells, NK cells) that are engineered to express a CEACAR, wherein the cancer cells express CEA. In one embodiment, the cancer to be treated is gastrointestinal cancer, or pancreatic cancer.

[0937] In one aspect, the present invention provides methods of treating cancer by providing to the subject in need thereof immune effector cells (e.g., T cells, NK cells) that are engineered to express an EPCAMCAR, wherein the cancer cells express EPCAM. In one embodiment, the cancer to be treated is gastrointestinal cancer.

[0938] In one aspect, the present invention provides methods of treating cancer by providing to the subject in need thereof immune effector cells (e.g., T cells, NK cells) that are engineered to express a B7H3CAR, wherein the cancer cells express B7H3.

[0939] In one aspect, the present invention provides methods of treating cancer by providing to the subject in need thereof immune effector cells (e.g., T cells, NK cells) that are engineered to express a KITCAR, wherein the cancer cells express KIT. In one embodiment, the cancer to be treated is gastrointestinal cancer.

[0940] In one aspect, the present invention provides methods of treating cancer by providing to the subject in need thereof immune effector cells (e.g., T cells, NK cells) that are engineered to express an IL-13Ra2CAR, wherein the cancer cells express IL-13Ra2. In one embodiment, the cancer to be treated is glioblastoma.

[0941] In one aspect, the present invention provides methods of treating cancer by providing to the subject in need thereof immune effector cells (e.g., T cells, NK cells) that are engineered to express a PRSS21CAR, wherein the cancer cells express PRSS21. In one embodiment, the cancer to be treated is selected from ovarian, pancreatic, lung and breast cancer.

[0942] In one aspect, the present invention provides methods of treating cancer by providing to the subject in need thereof immune effector cells (e.g., T cells, NK cells) that are engineered to express a CD30CAR, wherein the cancer cells express CD30. In one embodiment, the cancer to be treated is lymphomas, or leukemias.

[0943] In one aspect, the present invention provides methods of treating cancer by providing to the subject in need thereof immune effector cells (e.g., T cells, NK cells) that are engineered to express a GD3CAR, wherein the cancer cells express GD3. In one embodiment, the cancer to be treated is melanoma.

[0944] In one aspect, the present invention provides methods of treating cancer by providing to the subject in need thereof immune effector cells (e.g., T cells, NK cells) that are engineered to express a CD171CAR, wherein the cancer cells express CD171. In one embodiment, the cancer to be treated is neuroblastoma, ovarian cancer, melanoma, breast cancer, pancreatic cancer, colon cancers, or NSCLC (non-small cell lung cancer).

[0945] In one aspect, the present invention provides methods of treating cancer by providing to the subject in need thereof immune effector cells (e.g., T cells, NK cells) that are engineered to express an IL-11RaCAR, wherein the cancer cells express IL-11Ra. In one embodiment, the cancer to be treated is osteosarcoma.

[0946] In one aspect, the present invention provides methods of treating cancer by providing to the subject in need thereof immune effector cells (e.g., T cells, NK cells) that are engineered to express a PSCACAR, wherein the cancer cells express PSCA. In one embodiment, the cancer to be treated is prostate cancer.

[0947] In one aspect, the present invention provides methods of treating cancer by providing to the subject in need thereof immune effector cells (e.g., T cells, NK cells) that are engineered to express a VEGFR2CAR, wherein the cancer cells express VEGFR2. In one embodiment, the cancer to be treated is a solid tumor.

[0948] In one aspect, the present invention provides methods of treating cancer by providing to the subject in need thereof immune effector cells (e.g., T cells, NK cells) that are engineered to express a LewisYCAR, wherein the cancer cells express LewisY. In one embodiment, the cancer to be treated is ovarian cancer, or AML.

[0949] In one aspect, the present invention provides methods of treating cancer by providing to the subject in need thereof immune effector cells (e.g., T cells, NK cells) that are engineered to express a CD24CAR, wherein the cancer cells express CD24. In one embodiment, the cancer to be treated is pancreatic cancer.

[0950] In one aspect, the present invention provides methods of treating cancer by providing to the subject in need thereof immune effector cells (e.g., T cells, NK cells) that are engineered to express a PDGFR-betaCAR, wherein the cancer cells express PDGFR-beta. In one embodiment, the cancer to be treated is breast cancer, prostate cancer, GIST (gastrointestinal stromal tumor), CML, DFSP (dermatofibrosarcoma protuberans), or glioma.

[0951] In one aspect, the present invention provides methods of treating cancer by providing to the subject in need thereof immune effector cells (e.g., T cells, NK cells) that are engineered to express a SSEA-4CAR, wherein the cancer cells express SSEA-4. In one embodiment, the cancer to be treated is glioblastoma, breast cancer, lung cancer, or stem cell cancer.

[0952] In one aspect, the present invention provides methods of treating cancer by providing to the subject in need thereof immune effector cells (e.g., T cells, NK cells) that are engineered to express a CD20CAR, wherein the cancer cells express CD20. In one embodiment, the cancer to be treated is B cell malignancies.

[0953] In one aspect, the present invention provides methods of treating cancer by providing to the subject in need thereof immune effector cells (e.g., T cells, NK cells) that are engineered to express a Folate receptor alphaCAR, wherein the cancer cells express folate receptor alpha. In one embodiment, the cancer to be treated is ovarian cancer, NSCLC, endometrial cancer, renal cancer, or other solid tumors.

[0954] In one aspect, the present invention provides methods of treating cancer by providing to the subject in need thereof immune effector cells (e.g., T cells, NK cells) that are engineered to express an ERBB2CAR, wherein the cancer cells express ERBB2 (Her2/neu). In one embodiment, the cancer to be treated is breast cancer, gastric cancer, colorectal cancer, lung cancer, or other solid tumors.

[0955] In one aspect, the present invention provides methods of treating cancer by providing to the subject in need thereof immune effector cells (e.g., T cells, NK cells) that are engineered to express a MUC1CAR, wherein the cancer cells express MUC1. In one embodiment, the cancer to be treated is breast cancer, lung cancer, or other solid tumors.

[0956] In one aspect, the present invention provides methods of treating cancer by providing to the subject in need thereof immune effector cells (e.g., T cells, NK cells) that are engineered to express an EGFRCAR, wherein the cancer cells express EGFR. In one embodiment, the cancer to be treated is glioblastoma, SCLC (small cell lung cancer), SCCHN (squamous cell carcinoma of the head and neck), NSCLC, or other solid tumors.

[0957] In one aspect, the present invention provides methods of treating cancer by providing to the subject in need thereof immune effector cells (e.g., T cells, NK cells) that are engineered to express a NCAMCAR, wherein the cancer cells express NCAM. In one embodiment, the cancer to be treated is neuroblastoma, or other solid tumors.

[0958] In one aspect, the present invention provides methods of treating cancer by providing to the subject in need thereof immune effector cells (e.g., T cells, NK cells) that are engineered to express a CAIXCAR, wherein the cancer cells express CAIX. In one embodiment, the cancer to be treated is renal cancer, CRC, cervical cancer, or other solid tumors.

[0959] In one aspect, the present invention provides methods of treating cancer by providing to the subject in need thereof immune effector cells (e.g., T cells, NK cells) that are engineered to express an EphA2CAR, wherein the cancer cells express EphA2. In one embodiment, the cancer to be treated is GBM.

[0960] In one aspect, the present invention provides methods of treating cancer by providing to the subject in need thereof immune effector cells (e.g., T cells, NK cells) that are engineered to express a GD3CAR, wherein the cancer cells express GD3. In one embodiment, the cancer to be treated is melanoma.

[0961] In one aspect, the present invention provides methods of treating cancer by providing to the subject in need thereof immune effector cells (e.g., T cells, NK cells) that are engineered to express a Fucosyl GM1CAR, wherein the cancer cells express Fucosyl GM

[0962] In one aspect, the present invention provides methods of treating cancer by providing to the subject in need thereof immune effector cells (e.g., T cells, NK cells) that are engineered to express a sLeCAR, wherein the cancer cells express sLe. In one embodiment, the cancer to be treated is NSCLC, or AML.

[0963] In one aspect, the present invention provides methods of treating cancer by providing to the subject in need thereof immune effector cells (e.g., T cells, NK cells) that are engineered to express a GM3CAR, wherein the cancer cells express GM3.

[0964] In one aspect, the present invention provides methods of treating cancer by providing to the subject in need thereof immune effector cells (e.g., T cells, NK cells) that are engineered to express a TGS5CAR, wherein the cancer cells express TGS5.

[0965] In one aspect, the present invention provides methods of treating cancer by providing to the subject in need thereof immune effector cells (e.g., T cells, NK cells) that are engineered to express a HMWMAACAR, wherein the cancer cells express HMWMAA. In one embodiment, the cancer to be treated is melanoma, glioblastoma, or breast cancer.

[0966] In one aspect, the present invention provides methods of treating cancer by providing to the subject in need thereof immune effector cells (e.g., T cells, NK cells) that are engineered to express an o-acetyl-GD2CAR, wherein the cancer cells express o-acetyl-GD2. In one embodiment, the cancer to be treated is neuroblastoma, or melanoma.

[0967] In one aspect, the present invention provides methods of treating cancer by providing to the subject in need thereof immune effector cells (e.g., T cells, NK cells) that are engineered to express a CD19CAR, wherein the cancer cells express CD19. In one embodiment, the cancer to be treated is Follicular lymphoma, CLL, ALL, or myeloma.

[0968] In one aspect, the present invention provides methods of treating cancer by providing to the subject in need thereof immune effector cells (e.g., T cells, NK cells) that are engineered to express a TEM1/CD248CAR, wherein the cancer cells express TEM1/CD248. In one embodiment, the cancer to be treated is a solid tumor.

[0969] In one aspect, the present invention provides methods of treating cancer by providing to the subject in need thereof immune effector cells (e.g., T cells, NK cells) that are engineered to express a TEM7RCAR, wherein the cancer cells express TEM7R. In one embodiment, the cancer to be treated is solid tumor.

[0970] In one aspect, the present invention provides methods of treating cancer by providing to the subject in need thereof immune effector cells (e.g., T cells, NK cells) that are engineered to express a CLDN6CAR, wherein the cancer cells express CLDN6. In one embodiment, the cancer to be treated is ovarian cancer, lung cancer, or breast cancer.

[0971] In one aspect, the present invention provides methods of treating cancer by providing to the subject in need thereof immune effector cells (e.g., T cells, NK cells) that are engineered to express a TSHRCAR, wherein the cancer cells express TSHR. In one embodiment, the cancer to be treated is thyroid cancer, or multiple myeloma.

[0972] In one aspect, the present invention provides methods of treating cancer by providing to the subject in need thereof immune effector cells (e.g., T cells, NK cells) that are engineered to express a GPRC5DCAR, wherein the cancer cells express GPRC5D. In one embodiment, the cancer to be treated is multiple myeloma.

[0973] In one aspect, the present invention provides methods of treating cancer by providing to the subject in need thereof immune effector cells (e.g., T cells, NK cells) that are engineered to express a CXORF61CAR, wherein the cancer cells express CXORF61.

[0974] In one aspect, the present invention provides methods of treating cancer by providing to the subject in need thereof immune effector cells (e.g., T cells, NK cells) that are engineered to express a CD97CAR, wherein the cancer cells express CD97. In one embodiment, the cancer to be treated is B cell malignancies, gastric cancer, pancreatic cancer, esophageal cancer, glioblastoma, breast cancer, or colorectal cancer.

[0975] In one aspect, the present invention provides methods of treating cancer by providing to the subject in need thereof immune effector cells (e.g., T cells, NK cells) that are engineered to express a CD179aCAR, wherein the cancer cells express CD179a. In one embodiment, the cancer to be treated is B cell malignancies.

[0976] In one aspect, the present invention provides methods of treating cancer by providing to the subject in need thereof immune effector cells (e.g., T cells, NK cells) that are engineered to express an ALK CAR, wherein the cancer cells express ALK. In one embodiment, the cancer to be treated is NSCLC, ALCL (anaplastic large cell lymphoma), IMT (inflammatory myofibroblastic tumor), or neuroblastoma.

[0977] In one aspect, the present invention provides methods of treating cancer by providing to the subject in need thereof immune effector cells (e.g., T cells, NK cells) that are engineered to express a Polysialic acid CAR, wherein the cancer cells express Polysialic acid. In one embodiment, the cancer to be treated is small cell lung cancer.

[0978] In one aspect, the present invention provides methods of treating cancer by providing to the subject in need thereof immune effector cells (e.g., T cells, NK cells) that are engineered to express a PLAC1CAR, wherein the cancer cells express PLAC1. In one embodiment, the cancer to be treated is HCC (hepatocellular carcinoma).

[0979] In one aspect, the present invention provides methods of treating cancer by providing to the subject in need thereof immune effector cells (e.g., T cells, NK cells) that are engineered to express a GloboHCAR, wherein the cancer cells express GloboH. In one embodiment, the cancer to be treated is ovarian cancer, gastric cancer, prostate cancer, lung cancer, breast cancer, or pancreatic cancer.

[0980] In one aspect, the present invention provides methods of treating cancer by providing to the subject in need thereof immune effector cells (e.g., T cells, NK cells) that are engineered to express a NY-BR-1CAR, wherein the cancer cells express NY-BR-1. In one embodiment, the cancer to be treated is breast cancer.

[0981] In one aspect, the present invention provides methods of treating cancer by providing to the subject in need thereof immune effector cells (e.g., T cells, NK cells) that are engineered to express a UPK2CAR, wherein the cancer cells express UPK2. In one embodiment, the cancer to be treated is bladder cancer.

[0982] In one aspect, the present invention provides methods of treating cancer by providing to the subject in need thereof immune effector cells (e.g., T cells, NK cells) that are engineered to express a HAVCR1CAR, wherein the cancer cells express HAVCR1. In one embodiment, the cancer to be treated is renal cancer.

[0983] In one aspect, the present invention provides methods of treating cancer by providing to the subject in need thereof immune effector cells (e.g., T cells, NK cells) that are engineered to express a ADRB3CAR, wherein the cancer cells express ADRB3. In one embodiment, the cancer to be treated is Ewing sarcoma.

[0984] In one aspect, the present invention provides methods of treating cancer by providing to the subject in need thereof immune effector cells (e.g., T cells, NK cells) that are engineered to express a PANX3CAR, wherein the cancer cells express PANX3. In one embodiment, the cancer to be treated is osteosarcoma.

[0985] In one aspect, the present invention provides methods of treating cancer by providing to the subject in need thereof immune effector cells (e.g., T cells, NK cells) that are engineered to express a GPR20CAR, wherein the cancer cells express GPR20. In one embodiment, the cancer to be treated is GIST.

[0986] In one aspect, the present invention provides methods of treating cancer by providing to the subject in need thereof immune effector cells (e.g., T cells, NK cells) that are engineered to express a LY6KCAR, wherein the cancer cells express LY6K. In one embodiment, the cancer to be treated is breast cancer, lung cancer, ovary caner, or cervix cancer.

[0987] In one aspect, the present invention provides methods of treating cancer by providing to the subject in need thereof immune effector cells (e.g., T cells, NK cells) that are engineered to express a OR51E2CAR, wherein the cancer cells express OR51E2. In one embodiment, the cancer to be treated is prostate cancer.

[0988] In one aspect, the present invention provides methods of treating cancer by providing to the subject in need thereof immune effector cells (e.g., T cells, NK cells) that are engineered to express a TARPCAR, wherein the cancer cells express TARP. In one embodiment, the cancer to be treated is prostate cancer.

[0989] In one aspect, the present invention provides methods of treating cancer by providing to the subject in need thereof immune effector cells (e.g., T cells, NK cells) that are engineered to express a WT1CAR, wherein the cancer cells express WT1.

[0990] In one aspect, the present invention provides methods of treating cancer by providing to the subject in need thereof immune effector cells (e.g., T cells, NK cells) that are engineered to express a NY-ESO-1CAR, wherein the cancer cells express NY-ESO-1.

[0991] In one aspect, the present invention provides methods of treating cancer by providing to the subject in need thereof immune effector cells (e.g., T cells, NK cells) that are engineered to express a LAGE-1a CAR, wherein the cancer cells express LAGE-1a.

[0992] In one aspect, the present invention provides methods of treating cancer by providing to the subject in need thereof immune effector cells (e.g., T cells, NK cells) that are engineered to express a MAGE-A1CAR, wherein the cancer cells express MAGE-A1. In one embodiment, the cancer to be treated is melanoma.

[0993] In one aspect, the present invention provides methods of treating cancer by providing to the subject in need thereof immune effector cells (e.g., T cells, NK cells) that are engineered to express a MAGE A1CAR, wherein the cancer cells express MAGE A1.

[0994] In one aspect, the present invention provides methods of treating cancer by providing to the subject in need thereof immune effector cells (e.g., T cells, NK cells) that are engineered to express a ETV6-AML CAR, wherein the cancer cells express ETV6-AML.

[0995] In one aspect, the present invention provides methods of treating cancer by providing to the subject in need thereof immune effector cells (e.g., T cells, NK cells) that are engineered to express a sperm protein 17 CAR, wherein the cancer cells express sperm protein 17. In one embodiment, the cancer to be treated is ovarian cancer, HCC, or NSCLC.

[0996] In one aspect, the present invention provides methods of treating cancer by providing to the subject in need thereof immune effector cells (e.g., T cells, NK cells) that are engineered to express a XAGE1CAR, wherein the cancer cells express XAGE1. In one embodiment, the cancer to be treated is Ewings, or rhabdo cancer.

[0997] In one aspect, the present invention provides methods of treating cancer by providing to the subject in need thereof immune effector cells (e.g., T cells, NK cells) that are engineered to express a Tie 2 CAR, wherein the cancer cells express Tie 2. In one embodiment, the cancer to be treated is a solid tumor.

[0998] In one aspect, the present invention provides methods of treating cancer by providing to the subject in need thereof immune effector cells (e.g., T cells, NK cells) that are engineered to express a MAD-CT-1CAR, wherein the cancer cells express MAD-CT-1. In one embodiment, the cancer to be treated is prostate cancer, or melanoma.

[0999] In one aspect, the present invention provides methods of treating cancer by providing to the subject in need thereof immune effector cells (e.g., T cells, NK cells) that are engineered to express a MAD-CT-2CAR, wherein the cancer cells express MAD-CT-2. In one embodiment, the cancer to be treated is prostate cancer, melanoma.

[1000] In one aspect, the present invention provides methods of treating cancer by providing to the subject in need thereof immune effector cells (e.g., T cells, NK cells) that are engineered to express a Fos-related antigen 1 CAR, wherein the cancer cells express Fos-related antigen 1. In one embodiment, the cancer to be treated is glioma, squamous cell cancer, or pancreatic cancer.

[1001] In one aspect, the present invention provides methods of treating cancer by providing to the subject in need thereof immune effector cells (e.g., T cells, NK cells) that are engineered to express a p53CAR, wherein the cancer cells express p53.

[1002] In one aspect, the present invention provides methods of treating cancer by providing to the subject in need thereof immune effector cells (e.g., T cells, NK cells) that are engineered to express a prostein CAR, wherein the cancer cells express prostein.

[1003] In one aspect, the present invention provides methods of treating cancer by providing to the subject in need thereof immune effector cells (e.g., T cells, NK cells) that are engineered to express a survivin and telomerase CAR, wherein the cancer cells express survivin and telomerase.

[1004] In one aspect, the present invention provides methods of treating cancer by providing to the subject in need thereof immune effector cells (e.g., T cells, NK cells) that are engineered to express a PCTA-1/Galectin 8 CAR, wherein the cancer cells express PCTA-1/Galectin 8.

[1005] In one aspect, the present invention provides methods of treating cancer by providing to the subject in need thereof immune effector cells (e.g., T cells, NK cells) that are engineered to express a MelanA/MART1CAR, wherein the cancer cells express MelanA/MART1.

[1006] In one aspect, the present invention provides methods of treating cancer by providing to the subject in need thereof immune effector cells (e.g., T cells, NK cells) that are engineered to express a Ras mutant CAR, wherein the cancer cells express Ras mutant.

[1007] In one aspect, the present invention provides methods of treating cancer by providing to the subject in need thereof immune effector cells (e.g., T cells, NK cells) that are engineered to express a p53 mutant CAR, wherein the cancer cells express p53 mutant.

[1008] In one aspect, the present invention provides methods of treating cancer by providing to the subject in need thereof immune effector cells (e.g., T cells, NK cells) that are engineered to express a hTERT CAR, wherein the cancer cells express hTERT.

[1009] In one aspect, the present invention provides methods of treating cancer by providing to the subject in need thereof immune effector cells (e.g., T cells, NK cells) that are engineered to express a sarcoma translocation breakpoints CAR, wherein the cancer cells express sarcoma translocation breakpoints. In one embodiment, the cancer to be treated is sarcoma.

[1010] In one aspect, the present invention provides methods of treating cancer by providing to the subject in need thereof immune effector cells (e.g., T cells, NK cells) that are engineered to express a ML-IAP CAR, wherein the cancer cells express ML-IAP. In one embodiment, the cancer to be treated is melanoma.

[1011] In one aspect, the present invention provides methods of treating cancer by providing to the subject in need thereof immune effector cells (e.g., T cells, NK cells) that are engineered to express an ERGCAR, wherein the cancer cells express ERG (TMPRSS2 ETS fusion gene).

[1012] In one aspect, the present invention provides methods of treating cancer by providing to the subject in need thereof immune effector cells (e.g., T cells, NK cells) that are engineered to express a NA17CAR, wherein the cancer cells express NA17. In one embodiment, the cancer to be treated is melanoma.

[1013] In one aspect, the present invention provides methods of treating cancer by providing to the subject in need thereof immune effector cells (e.g., T cells, NK cells) that are engineered to express a PAX3CAR, wherein the cancer cells express PAX3. In one embodiment, the cancer to be treated is alveolar rhabdomyosarcoma.

[1014] In one aspect, the present invention provides methods of treating cancer by providing to the subject in need thereof immune effector cells (e.g., T cells, NK cells) that are engineered to express an androgen receptor CAR, wherein the cancer cells express androgen receptor. In one embodiment, the cancer to be treated is metastatic prostate cancer.

[1015] In one aspect, the present invention provides methods of treating cancer by providing to the subject in need thereof immune effector cells (e.g., T cells, NK cells) that are engineered to express a Cyclin B1CAR, wherein the cancer cells express Cyclin B 1.

[1016] In one aspect, the present invention provides methods of treating cancer by providing to the subject in need thereof immune effector cells (e.g., T cells, NK cells) that are engineered to express a MYCNCAR, wherein the cancer cells express MYCN.

[1017] In one aspect, the present invention provides methods of treating cancer by providing to the subject in need thereof immune effector cells (e.g., T cells, NK cells) that are engineered to express a RhoC CAR, wherein the cancer cells express RhoC.

[1018] In one aspect, the present invention provides methods of treating cancer by providing to the subject in need thereof immune effector cells (e.g., T cells, NK cells) that are engineered to express a TRP-2CAR, wherein the cancer cells express TRP-2. In one embodiment, the cancer to be treated is melanoma.

[1019] In one aspect, the present invention provides methods of treating cancer by providing to the subject in need thereof immune effector cells (e.g., T cells, NK cells) that are engineered to express a CYP1B1CAR, wherein the cancer cells express CYP1B1. In one embodiment, the cancer to be treated is breast cancer, colon cancer, lung cancer, esophagus cancer, skin cancer, lymph node cancer, brain cancer, or testis cancer.

[1020] In one aspect, the present invention provides methods of treating cancer by providing to the subject in need thereof immune effector cells (e.g., T cells, NK cells) that are engineered to express a BORIS CAR, wherein the cancer cells express BORIS. In one embodiment, the cancer to be treated is lung cancer.

[1021] In one aspect, the present invention provides methods of treating cancer by providing to the subject in need thereof immune effector cells (e.g., T cells, NK cells) that are engineered to express a SART3CAR, wherein the cancer cells express SART3

[1022] In one aspect, the present invention provides methods of treating cancer by providing to the subject in need thereof immune effector cells (e.g., T cells, NK cells) that are engineered to express a PAX5CAR, wherein the cancer cells express PAX5.

[1023] In one aspect, the present invention provides methods of treating cancer by providing to the subject in need thereof immune effector cells (e.g., T cells, NK cells) that are engineered to express a OY-TES1CAR, wherein the cancer cells express OY-TES1.

[1024] In one aspect, the present invention provides methods of treating cancer by providing to the subject in need thereof immune effector cells (e.g., T cells, NK cells) that are engineered to express a LCK CAR, wherein the cancer cells express LCK.

[1025] In one aspect, the present invention provides methods of treating cancer by providing to the subject in need thereof immune effector cells (e.g., T cells, NK cells) that are engineered to express a AKAP-4CAR, wherein the cancer cells express AKAP-4.

[1026] In one aspect, the present invention provides methods of treating cancer by providing to the subject in need thereof immune effector cells (e.g., T cells, NK cells) that are engineered to express a SSX2CAR, wherein the cancer cells express SSX2.

[1027] In one aspect, the present invention provides methods of treating cancer by providing to the subject in need thereof immune effector cells (e.g., T cells, NK cells) that are engineered to express a RAGE-1CAR, wherein the cancer cells express RAGE-1. In one embodiment, the cancer to be treated is RCC (renal cell cancer), or other solid tumors

[1028] In one aspect, the present invention provides methods of treating cancer by providing to the subject in need thereof immune effector cells (e.g., T cells, NK cells) that are engineered to express a human telomerase reverse transcriptase CAR, wherein the cancer cells express human telomerase reverse transcriptase. In one embodiment, the cancer to be treated is solid tumors.

[1029] In one aspect, the present invention provides methods of treating cancer by providing to the subject in need thereof immune effector cells (e.g., T cells, NK cells) that are engineered to express a RU1CAR, wherein the cancer cells express RU1.

[1030] In one aspect, the present invention provides methods of treating cancer by providing to the subject in need thereof immune effector cells (e.g., T cells, NK cells) that are engineered to express a RU2CAR, wherein the cancer cells express RU2.

[1031] In one aspect, the present invention provides methods of treating cancer by providing to the subject in need thereof immune effector cells (e.g., T cells, NK cells) that are engineered to express an intestinal carboxyl esterase CAR, wherein the cancer cells express intestinal carboxyl esterase. In one embodiment, the cancer to be treated is thyroid cancer, RCC, CRC (colorectal cancer), breast cancer, or other solid tumors.

[1032] In one aspect, the present invention provides methods of treating cancer by providing to the subject in need thereof immune effector cells (e.g., T cells, NK cells) that are engineered to express a Prostase CAR, wherein the cancer cells express Prostase.

[1033] In one aspect, the present invention provides methods of treating cancer by providing to the subject in need thereof immune effector cells (e.g., T cells, NK cells) that are engineered to express a PAPCAR, wherein the cancer cells express PAP.

[1034] In one aspect, the present invention provides methods of treating cancer by providing to the subject in need thereof immune effector cells (e.g., T cells, NK cells) that are engineered to express an IGF-I receptor CAR, wherein the cancer cells express IGF-I receptor.

[1035] In one aspect, the present invention provides methods of treating cancer by providing to the subject in need thereof immune effector cells (e.g., T cells, NK cells) that are engineered to express a gp100 CAR, wherein the cancer cells express gp100.

[1036] In one aspect, the present invention provides methods of treating cancer by providing to the subject in need thereof immune effector cells (e.g., T cells, NK cells) that are engineered to express a bcr-abl CAR, wherein the cancer cells express bcr-abl.

[1037] In one aspect, the present invention provides methods of treating cancer by providing to the subject in need thereof immune effector cells (e.g., T cells, NK cells) that are engineered to express a tyrosinase CAR, wherein the cancer cells express tyrosinase.

[1038] In one aspect, the present invention provides methods of treating cancer by providing to the subject in need thereof immune effector cells (e.g., T cells, NK cells) that are engineered to express a Fucosyl GM1CAR, wherein the cancer cells express Fucosyl GM1.

[1039] In one aspect, the present invention provides methods of treating cancer by providing to the subject in need thereof immune effector cells (e.g., T cells, NK cells) that are engineered to express a mut hsp70-2CAR, wherein the cancer cells express mut hsp70-2. In one embodiment, the cancer to be treated is melanoma.

[1040] In one aspect, the present invention provides methods of treating cancer by providing to the subject in need thereof immune effector cells (e.g., T cells, NK cells) that are engineered to express a CD79a CAR, wherein the cancer cells express CD79a.

[1041] In one aspect, the present invention provides methods of treating cancer by providing to the subject in need thereof immune effector cells (e.g., T cells, NK cells) that are engineered to express a CD79b CAR, wherein the cancer cells express CD79b.

[1042] In one aspect, the present invention provides methods of treating cancer by providing to the subject in need thereof immune effector cells (e.g., T cells, NK cells) that are engineered to express a CD72 CAR, wherein the cancer cells express CD72.

[1043] In one aspect, the present invention provides methods of treating cancer by providing to the subject in need thereof immune effector cells (e.g., T cells, NK cells) that are engineered to express a LAIR1 CAR, wherein the cancer cells express LAIR1.

[1044] In one aspect, the present invention provides methods of treating cancer by providing to the subject in need thereof immune effector cells (e.g., T cells, NK cells) that are engineered to express a FCAR CAR, wherein the cancer cells express FCAR.

[1045] In one aspect, the present invention provides methods of treating cancer by providing to the subject in need thereof immune effector cells (e.g., T cells, NK cells) that are engineered to express a LILRA2 CAR, wherein the cancer cells express LILRA2.

[1046] In one aspect, the present invention provides methods of treating cancer by providing to the subject in need thereof immune effector cells (e.g., T cells, NK cells) that are engineered to express a CD300LF CAR, wherein the cancer cells express CD300LF.

[1047] In one aspect, the present invention provides methods of treating cancer by providing to the subject in need thereof immune effector cells (e.g., T cells, NK cells) that are engineered to express a CLEC12A CAR, wherein the cancer cells express CLEC12A.

[1048] In one aspect, the present invention provides methods of treating cancer by providing to the subject in need thereof immune effector cells (e.g., T cells, NK cells) that are engineered to express a BST2 CAR, wherein the cancer cells express BST2.

[1049] In one aspect, the present invention provides methods of treating cancer by providing to the subject in need thereof immune effector cells (e.g., T cells, NK cells) that are engineered to express an EMR2 CAR, wherein the cancer cells express EMR2.

[1050] In one aspect, the present invention provides methods of treating cancer by providing to the subject in need thereof immune effector cells (e.g., T cells, NK cells) that are engineered to express a LY75 CAR, wherein the cancer cells express LY75.

[1051] In one aspect, the present invention provides methods of treating cancer by providing to the subject in need thereof immune effector cells (e.g., T cells, NK cells) that are engineered to express a GPC3 CAR, wherein the cancer cells express GPC3.

[1052] In one aspect, the present invention provides methods of treating cancer by providing to the subject in need thereof immune effector cells (e.g., T cells, NK cells) that are engineered to express a FCRL5 CAR, wherein the cancer cells express FCRL5.

[1053] In one aspect, the present invention provides methods of treating cancer by providing to the subject in need thereof immune effector cells (e.g., T cells, NK cells) that are engineered to express an IGLL1 CAR, wherein the cancer cells express IGLL1.

[1054] In one aspect, the present invention relates to treatment of a subject in vivo using an PD1 CAR such that growth of cancerous tumors is inhibited. A PD1 CAR may be used alone to inhibit the growth of cancerous tumors. Alternatively, PD1 CAR may be used in conjunction with other CARs, immunogenic agents, standard cancer treatments, or other antibodies. In one embodiment, the subject is treated with a PD1 CAR and an XCAR described herein. In an embodiment, a PD1 CAR is used in conjunction with another CAR, e.g., a CAR described herein, and a kinase inhibitor, e.g., a kinase inhibitor described herein.

[1055] In another aspect, a method of treating a subject, e.g., reducing or ameliorating, a hyperproliferative condition or disorder (e.g., a cancer), e.g., solid tumor, a soft tissue tumor, or a metastatic lesion, in a subject is provided. As used herein, the term “cancer” is meant to include all types of cancerous growths or oncogenic processes, metastatic tissues or malignantly transformed cells, tissues, or organs, irrespective of histopathologic type or stage of invasiveness. Examples of solid tumors include malignancies, e.g., sarcomas, adenocarcinomas, and carcinomas, of the various organ systems, such as those affecting liver, lung, breast, lymphoid, gastrointestinal (e.g., colon), genitourinary tract (e.g., renal, urothelial cells), prostate and pharynx. Adenocarcinomas include malignancies such as most colon cancers, rectal cancer, renal-cell carcinoma, liver cancer, non-small cell carcinoma of the lung, cancer of the small intestine and cancer of the esophagus. In one embodiment, the cancer is a melanoma, e.g., an advanced stage melanoma. Metastatic lesions of the aforementioned cancers can also be treated or prevented using the methods and compositions of the invention. Examples of other cancers that can be treated include bone cancer, pancreatic cancer, skin cancer, cancer of the head or neck, cutaneous or intraocular malignant melanoma, uterine cancer, ovarian cancer, rectal cancer, cancer of the anal region, stomach cancer, testicular cancer, uterine cancer, carcinoma of the fallopian tubes, carcinoma of the endometrium, carcinoma of the cervix, carcinoma of the vagina, carcinoma of the vulva, Hodgkin Disease, non-Hodgkin lymphoma, cancer of the esophagus, cancer of the small intestine, cancer of the endocrine system, cancer of the thyroid gland, cancer of the parathyroid gland, cancer of the adrenal gland, sarcoma of soft tissue, cancer of the urethra, cancer of the penis, chronic or acute leukemias including acute myeloid leukemia, chronic myeloid leukemia, acute lymphoblastic leukemia, chronic lymphocytic leukemia, solid tumors of childhood, lymphocytic lymphoma, cancer of the bladder, cancer of the kidney or ureter, carcinoma of the renal pelvis, neoplasm of the central nervous system (CNS), primary CNS lymphoma, tumor angiogenesis, spinal axis tumor, brain stem glioma, pituitary adenoma, Kaposi's sarcoma, epidermoid cancer, squamous cell cancer, T-cell lymphoma, environmentally induced cancers including those induced by asbestos, and combinations of said cancers. Treatment of metastatic cancers, e.g., metastatic cancers that express PD-L1 (Iwai et al. (2005) Int. Immunol. 17:133-144) can be effected using the antibody molecules described herein.

[1056] Exemplary cancers whose growth can be inhibited include cancers typically responsive to immunotherapy. Non-limiting examples of cancers for treatment include melanoma (e.g., metastatic malignant melanoma), renal cancer (e.g. clear cell carcinoma), prostate cancer (e.g. hormone refractory prostate adenocarcinoma), breast cancer, colon cancer and lung cancer (e.g. non-small cell lung cancer). Additionally, refractory or recurrent malignancies can be treated using the molecules described herein.

[1057] In one aspect, the invention pertains to a vector comprising a CAR operably linked to promoter for expression in mammalian immune effector cells (e.g., T cells, NK cells). In one aspect, the invention provides a recombinant immune effector cell expressing a CAR of the present invention for use in treating cancer expressing a cancer associate antigen as described herein. In one aspect, CAR-expressing cells of the invention is capable of contacting a tumor cell with at least one cancer associated antigen expressed on its surface such that the CAR-expressing cell targets the cancer cell and growth of the cancer is inhibited.

[1058] In one aspect, the invention pertains to a method of inhibiting growth of a cancer, comprising contacting the cancer cell with a CAR-expressing cell of the present invention such that the CART is activated in response to the antigen and targets the cancer cell, wherein the growth of the tumor is inhibited.

[1059] In one aspect, the invention pertains to a method of treating cancer in a subject. The method comprises administering to the subject CAR-expressing cell of the present invention such that the cancer is treated in the subject. In one aspect, the cancer associated with expression of a cancer associate antigen as described herein is a hematological cancer. In one aspect, the hematological cancer is a leukemia or a lymphoma. In one aspect, a cancer associated with expression of a cancer associate antigen as described herein includes cancers and malignancies including, but not limited to, e.g., one or more acute leukemias including but not limited to, e.g., B-cell acute Lymphoid Leukemia (“BALL”), T-cell acute Lymphoid Leukemia (“TALL”), acute lymphoid leukemia (ALL); one or more chronic leukemias including but not limited to, e.g., chronic myelogenous leukemia (CML), Chronic Lymphoid Leukemia (CLL). Additional cancers or hematologic conditions associated with expression of a cancer associate antigen as described herein include, but are not limited to, e.g., B cell prolymphocytic leukemia, blastic plasmacytoid dendritic cell neoplasm, Burkitt's lymphoma, diffuse large B cell lymphoma, Follicular lymphoma, Hairy cell leukemia, small cell- or a large cell-follicular lymphoma, malignant lymphoproliferative conditions, MALT lymphoma, mantle cell lymphoma, Marginal zone lymphoma, multiple myeloma, myelodysplasia and myelodysplastic syndrome, non-Hodgkin lymphoma, plasmablastic lymphoma, plasmacytoid dendritic cell neoplasm, Waldenstrom macroglobulinemia, and “preleukemia” which are a diverse collection of hematological conditions united by ineffective production (or dysplasia) of myeloid blood cells, and the like. Further a disease associated with a cancer associate antigen as described herein expression include, but not limited to, e.g., atypical and/or non-classical cancers, malignancies, precancerous conditions or proliferative diseases associated with expression of a cancer associate antigen as described herein.

[1060] In some embodiments, a cancer that can be treated with CAR-expressing cell of the present invention is multiple myeloma. Multiple myeloma is a cancer of the blood, characterized by accumulation of a plasma cell clone in the bone marrow. Current therapies for multiple myeloma include, but are not limited to, treatment with lenalidomide, which is an analog of thalidomide. Lenalidomide has activities which include anti-tumor activity, angiogenesis inhibition, and immunomodulation. Generally, myeloma cells are thought to be negative for a cancer associate antigen as described herein expression by flow cytometry. Thus, in some embodiments, a CD19 CAR, e.g., as described herein, may be used to target myeloma cells. In some embodiments, cars of the present invention therapy can be used in combination with one or more additional therapies, e.g., lenalidomide treatment.

[1061] The invention includes a type of cellular therapy where immune effector cells (e.g., T cells, NK cells) are genetically modified to express a chimeric antigen receptor (CAR) and the CAR-expressing T cell or NK cell is infused to a recipient in need thereof. The infused cell is able to kill tumor cells in the recipient. Unlike antibody therapies, CAR-modified immune effector cells (e.g., T cells, NK cells) are able to replicate in vivo resulting in long-term persistence that can lead to sustained tumor control. In various aspects, the immune effector cells (e.g., T cells, NK cells) administered to the patient, or their progeny, persist in the patient for at least four months, five months, six months, seven months, eight months, nine months, ten months, eleven months, twelve months, thirteen months, fourteen month, fifteen months, sixteen months, seventeen months, eighteen months, nineteen months, twenty months, twenty-one months, twenty-two months, twenty-three months, two years, three years, four years, or five years after administration of the T cell or NK cell to the patient.

[1062] The invention also includes a type of cellular therapy where immune effector cells (e.g., T cells, NK cells) are modified, e.g., by in vitro transcribed RNA, to transiently express a chimeric antigen receptor (CAR) and the CAR T cell or NK cell is infused to a recipient in need thereof. The infused cell is able to kill tumor cells in the recipient. Thus, in various aspects, the immune effector cells (e.g., T cells, NK cells) administered to the patient, is present for less than one month, e.g., three weeks, two weeks, one week, after administration of the T cell or NK cell to the patient.

[1063] Without wishing to be bound by any particular theory, the anti-tumor immunity response elicited by the CAR-modified immune effector cells (e.g., T cells, NK cells) may be an active or a passive immune response, or alternatively may be due to a direct vs indirect immune response. In one aspect, the CAR transduced immune effector cells (e.g., T cells, NK cells) exhibit specific proinflammatory cytokine secretion and potent cytolytic activity in response to human cancer cells expressing the a cancer associate antigen as described herein, resist soluble a cancer associate antigen as described herein inhibition, mediate bystander killing and mediate regression of an established human tumor. For example, antigen-less tumor cells within a heterogeneous field of a cancer associate antigen as described herein-expressing tumor may be susceptible to indirect destruction by a cancer associate antigen as described herein-redirected immune effector cells (e.g., T cells, NK cells) that has previously reacted against adjacent antigen-positive cancer cells.

[1064] In one aspect, the fully-human CAR-modified immune effector cells (e.g., T cells, NK cells) of the invention may be a type of vaccine for ex vivo immunization and/or in vivo therapy in a mammal. In one aspect, the mammal is a human.

[1065] With respect to ex vivo immunization, at least one of the following occurs in vitro prior to administering the cell into a mammal: i) expansion of the cells, ii) introducing a nucleic acid encoding a CAR to the cells or iii) cryopreservation of the cells.

[1066] Ex vivo procedures are well known in the art and are discussed more fully below. Briefly, cells are isolated from a mammal (e.g., a human) and genetically modified (i.e., transduced or transfected in vitro) with a vector expressing a CAR disclosed herein. The CAR-modified cell can be administered to a mammalian recipient to provide a therapeutic benefit. The mammalian recipient may be a human and the CAR-modified cell can be autologous with respect to the recipient. Alternatively, the cells can be allogeneic, syngeneic or xenogeneic with respect to the recipient.

[1067] The procedure for ex vivo expansion of hematopoietic stem and progenitor cells is described in U.S. Pat. No. 5,199,942, incorporated herein by reference, can be applied to the cells of the present invention. Other suitable methods are known in the art, therefore the present invention is not limited to any particular method of ex vivo expansion of the cells. Briefly, ex vivo culture and expansion of immune effector cells (e.g., T cells, NK cells) comprises: (1) collecting CD34+ hematopoietic stem and progenitor cells from a mammal from peripheral blood harvest or bone marrow explants; and (2) expanding such cells ex vivo. In addition to the cellular growth factors described in U.S. Pat. No. 5,199,942, other factors such as flt3-L, IL-1, IL-3 and c-kit ligand, can be used for culturing and expansion of the cells.

[1068] In addition to using a cell-based vaccine in terms of ex vivo immunization, the present invention also provides compositions and methods for in vivo immunization to elicit an immune response directed against an antigen in a patient.

[1069] Generally, the cells activated and expanded as described herein may be utilized in the treatment and prevention of diseases that arise in individuals who are immunocompromised. In particular, the CAR-modified immune effector cells (e.g., T cells, NK cells) of the invention are used in the treatment of diseases, disorders and conditions associated with expression of a cancer associate antigen as described herein. In certain aspects, the cells of the invention are used in the treatment of patients at risk for developing diseases, disorders and conditions associated with expression of a cancer associate antigen as described herein. Thus, the present invention provides methods for the treatment or prevention of diseases, disorders and conditions associated with expression of a cancer associate antigen as described herein comprising administering to a subject in need thereof, a therapeutically effective amount of the CAR-modified immune effector cells (e.g., T cells, NK cells) of the invention.

[1070] In one aspect the CAR-expressing cells of the inventions may be used to treat a proliferative disease such as a cancer or malignancy or is a precancerous condition such as a myelodysplasia, a myelodysplastic syndrome or a preleukemia. Further a disease associated with a cancer associate antigen as described herein expression include, but not limited to, e.g., atypical and/or non-classical cancers, malignancies, precancerous conditions or proliferative diseases expressing a cancer associated antigen as described herein. Non-cancer related indications associated with expression of a cancer associate antigen as described herein include, but are not limited to, e.g., autoimmune disease, (e.g., lupus), inflammatory disorders (allergy and asthma) and transplantation.

[1071] The CAR-modified immune effector cells (e.g., T cells, NK cells) of the present invention may be administered either alone, or as a pharmaceutical composition in combination with diluents and/or with other components such as IL-2 or other cytokines or cell populations.

[1072] Hematologic Cancer

[1073] Hematological cancer conditions are the types of cancer such as leukemia, lymphoma, and malignant lymphoproliferative conditions that affect blood, bone marrow and the lymphatic system.

[1074] Leukemia can be classified as acute leukemia and chronic leukemia. Acute leukemia can be further classified as acute myelogenous leukemia (AML) and acute lymphoid leukemia (ALL). Chronic leukemia includes chronic myelogenous leukemia (CML) and chronic lymphoid leukemia (CLL). Other related conditions include myelodysplastic syndromes (MDS, formerly known as “preleukemia”) which are a diverse collection of hematological conditions united by ineffective production (or dysplasia) of myeloid blood cells and risk of transformation to AML.

[1075] Lymphoma is a group of blood cell tumors that develop from lymphocytes. Exemplary lymphomas include non-Hodgkin lymphoma and Hodgkin lymphoma.

[1076] The present invention provides for compositions and methods for treating cancer. In one aspect, the cancer is a hematologic cancer including but is not limited to hematological cancer is a leukemia or a lymphoma. In one aspect, the CAR-expressing cells of the invention may be used to treat cancers and malignancies such as, but not limited to, e.g., acute leukemias including but not limited to, e.g., B-cell acute lymphoid leukemia (“BALL”), T-cell acute lymphoid leukemia (“TALL”), acute lymphoid leukemia (ALL); one or more chronic leukemias including but not limited to, e.g., chronic myelogenous leukemia (CML), chronic lymphocytic leukemia (CLL); additional hematologic cancers or hematologic conditions including, but not limited to, e.g., B cell prolymphocytic leukemia, blastic plasmacytoid dendritic cell neoplasm, Burkitt's lymphoma, diffuse large B cell lymphoma, Follicular lymphoma, Hairy cell leukemia, small cell- or a large cell-follicular lymphoma, malignant lymphoproliferative conditions, MALT lymphoma, mantle cell lymphoma, Marginal zone lymphoma, multiple myeloma, myelodysplasia and myelodysplastic syndrome, non-Hodgkin lymphoma, plasmablastic lymphoma, plasmacytoid dendritic cell neoplasm, Waldenstrom macroglobulinemia, and “preleukemia” which are a diverse collection of hematological conditions united by ineffective production (or dysplasia) of myeloid blood cells, and the like. Further a disease associated with a cancer associate antigen as described herein expression includes, but not limited to, e.g., atypical and/or non-classical cancers, malignancies, precancerous conditions or proliferative diseases expressing a cancer associate antigen as described herein.

[1077] The present invention also provides methods for inhibiting the proliferation or reducing a cancer associated antigen as described herein-expressing cell population, the methods comprising contacting a population of cells comprising a cancer associated antigen as described herein-expressing cell with a CAR-expressing T cell or NK cell of the invention that binds to the a cancer associate antigen as described herein-expressing cell. In a specific aspect, the present invention provides methods for inhibiting the proliferation or reducing the population of cancer cells expressing a cancer associated antigen as described herein, the methods comprising contacting a cancer associate antigen as described herein-expressing cancer cell population with a CAR-expressing T cell or NK cell of the invention that binds to a cancer associated antigen as described herein-expressing cell. In one aspect, the present invention provides methods for inhibiting the proliferation or reducing the population of cancer cells expressing a cancer associated antigen as described herein, the methods comprising contacting a cancer associated antigen as described herein-expressing cancer cell population with a CAR-expressing T cell or NK cell of the invention that binds to a cancer associated antigen as described herein-expressing cell. In certain aspects, a CAR-expressing T cell or NK cell of the invention reduces the quantity, number, amount or percentage of cells and/or cancer cells by at least 25%, at least 30%, at least 40%, at least 50%, at least 65%, at least 75%, at least 85%, at least 95%, or at least 99% in a subject with or animal model for myeloid leukemia or another cancer associated with a cancer associated antigen as described herein-expressing cells relative to a negative control. In one aspect, the subject is a human.

[1078] The present invention also provides methods for preventing, treating and/or managing a disease associated with a cancer associated antigen as described herein-expressing cells (e.g., a hematologic cancer or atypical cancer expressing a cancer associated antigen as described herein), the methods comprising administering to a subject in need a CAR T cell or NK cell of the invention that binds to a cancer associated antigen as described herein-expressing cell. In one aspect, the subject is a human. Non-limiting examples of disorders associated with a cancer associated antigen as described herein-expressing cells include autoimmune disorders (such as lupus), inflammatory disorders (such as allergies and asthma) and cancers (such as hematological cancers or atypical cancers expressing a cancer associated antigen as described herein).

[1079] The present invention also provides methods for preventing, treating and/or managing a disease associated with a cancer associated antigen as described herein-expressing cells, the methods comprising administering to a subject in need a CAR T cell or NK cell of the invention that binds to a cancer associated antigen as described herein-expressing cell. In one aspect, the subject is a human

[1080] The present invention provides methods for preventing relapse of cancer associated with a cancer associated antigen as described herein-expressing cells, the methods comprising administering to a subject in need thereof a CAR T cell or NK cell of the invention that binds to a cancer associated antigen as described herein-expressing cell. In one aspect, the methods comprise administering to the subject in need thereof an effective amount of a CAR-expressing T cell or NK cell described herein that binds to a cancer associated antigen as described herein-expressing cell in combination with an effective amount of another therapy.

### Combination Therapies

[1081] A CAR-expressing cell described herein may be used in combination with other known agents and therapies. Administered “in combination”, as used herein, means that two (or more) different treatments are delivered to the subject during the course of the subject's affliction with the disorder, e.g., the two or more treatments are delivered after the subject has been diagnosed with the disorder and before the disorder has been cured or eliminated or treatment has ceased for other reasons. In some embodiments, the delivery of one treatment is still occurring when the delivery of the second begins, so that there is overlap in terms of administration. This is sometimes referred to herein as “simultaneous” or “concurrent delivery”. In other embodiments, the delivery of one treatment ends before the delivery of the other treatment begins. In some embodiments of either case, the treatment is more effective because of combined administration. For example, the second treatment is more effective, e.g., an equivalent effect is seen with less of the second treatment, or the second treatment reduces symptoms to a greater extent, than would be seen if the second treatment were administered in the absence of the first treatment, or the analogous situation is seen with the first treatment. In some embodiments, delivery is such that the reduction in a symptom, or other parameter related to the disorder is greater than what would be observed with one treatment delivered in the absence of the other. The effect of the two treatments can be partially additive, wholly additive, or greater than additive. The delivery can be such that an effect of the first treatment delivered is still detectable when the second is delivered.

[1082] A CAR-expressing cell described herein and the at least one additional therapeutic agent can be administered simultaneously, in the same or in separate compositions, or sequentially. For sequential administration, the CAR-expressing cell described herein can be administered first, and the additional agent can be administered second, or the order of administration can be reversed.

[1083] The CAR therapy and/or other therapeutic agents, procedures or modalities can be administered during periods of active disorder, or during a period of remission or less active disease. The CAR therapy can be administered before the other treatment, concurrently with the treatment, post-treatment, or during remission of the disorder.

[1084] When administered in combination, the CAR therapy and the additional agent (e.g., second or third agent), or all, can be administered in an amount or dose that is higher, lower or the same than the amount or dosage of each agent used individually, e.g., as a monotherapy. In certain embodiments, the administered amount or dosage of the CAR therapy, the additional agent (e.g., second or third agent), or all, is lower (e.g., at least 20%, at least 30%, at least 40%, or at least 50%) than the amount or dosage of each agent used individually, e.g., as a monotherapy. In other embodiments, the amount or dosage of the CAR therapy, the additional agent (e.g., second or third agent), or all, that results in a desired effect (e.g., treatment of cancer) is lower (e.g., at least 20%, at least 30%, at least 40%, or at least 50% lower) than the amount or dosage of each agent used individually, e.g., as a monotherapy, required to achieve the same therapeutic effect.

[1085] In certain embodiments of the methods or uses described herein, the CAR molecule is administered in combination with an agent that increases the efficacy of the immune effector cell, e.g., one or more of a protein phosphatase inhibitor, a kinase inhibitor, a cytokine, an inhibitor of an immune inhibitory molecule; or an agent that decreases the level or activity of a T_{REG} cell.

[1086] In certain embodiments of the methods or uses described herein, the protein phosphatase inhibitor is an SHP-1 inhibitor and/or an SHP-2 inhibitor.

[1087] In other embodiments of the methods or uses described herein, kinase inhibitor is chosen from one or more of a CDK4 inhibitor, a CDK4/6 inhibitor (e.g., palbociclib), a BTK inhibitor (e.g., ibrutinib or RN-486), an mTOR inhibitor (e.g., rapamycin or everolimus (RAD001)), an MNK inhibitor, or a dual P13K/mTOR inhibitor. In one embodiment, the BTK inhibitor does not reduce or inhibit the kinase activity of interleukin-2-inducible kinase (ITK).

[1088] In other embodiments of the methods or uses described herein, the agent that inhibits the immune inhibitory molecule comprises an antibody or antibody fragment, an inhibitory nucleic acid, a clustered regularly interspaced short palindromic repeats (CRISPR), a transcription-activator like effector nuclease (TALEN), or a zinc finger endonuclease (ZFN) that inhibits the expression of the inhibitory molecule.

[1089] In other embodiments of the methods or uses described herein, the agent that decreases the level or activity of the T_{REG} cells is chosen from cyclophosphamide, anti-GITR antibody, CD25-depletion, or a combination thereof.

[1090] In certain embodiments of the methods or uses described herein, the immune inhibitory molecule is selected from the group consisting of PD1, PD-L1, CTLA-4, TIM-3, LAG-3, VISTA, BTLA, TIGIT, LAIR1, CD160, 2B4, TGF beta, CEACAM-1, CEACAM-3, and CEACAM-5.

[1091] In other embodiments, the agent that inhibits the inhibitory molecule comprises a first polypeptide comprising an inhibitory molecule or a fragment thereof and a second polypeptide that provides a positive signal to the cell, and wherein the first and second polypeptides are expressed on the CAR-containing immune cells, wherein (i) the first polypeptide comprises PD1, PD-L1, CTLA-4, TIM-3, LAG3, VISTA, BTLA, TIGIT, LAIR1, CD160, 2B4, TGF beta, CEACAM-1, CEACAM-3, and CEACAM-5 or a fragment thereof; and/or (ii) the second polypeptide comprises an intracellular signaling domain comprising a primary signaling domain and/or a costimulatory signaling domain. In one embodiment, the primary signaling domain comprises a functional domain of CD3 zeta; and/or the costimulatory signaling domain comprises a functional domain of a protein selected from 41BB, CD27 and CD28, or a functional variant thereof.

[1092] In other embodiments, cytokine is chosen from IL-7, IL-15 or IL-21, or both.

[1093] In other embodiments, the immune effector cell comprising the CAR molecule and a second, e.g., any of the combination therapies disclosed herein (e.g., the agent that that increases the efficacy of the immune effector cell) are administered substantially simultaneously or sequentially.

[1094] In other embodiments, the immune cell comprising the CAR molecule is administered in combination with a molecule that targets GITR and/or modulates GITR function. In certain embodiments, the molecule targeting GITR and/or modulating GITR function is administered prior to the CAR-expressing cell or population of cells, or prior to apheresis.

[1095] In one embodiment, lymphocyte infusion, for example allogeneic lymphocyte infusion, is used in the treatment of the cancer, wherein the lymphocyte infusion comprises at least one CAR-expressing cell of the present invention. In one embodiment, autologous lymphocyte infusion is used in the treatment of the cancer, wherein the autologous lymphocyte infusion comprises at least one CAR-expressing cell described herein.

[1096] In one embodiment, the cell is a T cell and the T cell is diacylglycerol kinase (DGK) deficient. In one embodiment, the cell is a T cell and the T cell is Ikaros deficient. In one embodiment, the cell is a T cell and the T cell is both DGK and Ikaros deficient.

[1097] In one embodiment, the method includes administering a cell expressing the CAR moleculein combination with an agent which enhances the activity of a CAR-expressing cell, wherein the agent is a cytokine, e.g., IL-7, IL-15, IL-21, or a combination thereof. The cytokine can be delivered in combination with, e.g., simultaneously or shortly after, administration of the CAR-expressing cell. Alternatively, the cytokine can be delivered after a prolonged period of time after administration of the CAR-expressing cell, e.g., after assessment of the subject's response to the CAR-expressing cell. In one embodiment the cytokine is administered to the subject simultaneously (e.g., administered on the same day) with or shortly after administration (e.g., administered 1 day, 2 days, 3 days, 4 days, 5 days, 6 days, or 7 days after administration) of the cell or population of cells of any of claims 61-80. In other embodiments, the cytokine is administered to the subject after a prolonged period of time (e.g., e.g., at least 2 weeks, 3 weeks, 4 weeks, 6 weeks, 8 weeks, 10 weeks, or more) after administration of the cell or population of cells of any of claims 61-80, or after assessment of the subject's response to the cell.

[1098] In other embodiments, the cells expressing a CAR molecule are administered in combination with an agent that ameliorates one or more side effects associated with administration of a cell expressing a CAR molecule. Side effects associated with the CAR-expressing cell can be chosen from cytokine release syndrome (CRS) or hemophagocytic lymphohistiocytosis (HLH).

[1099] In embodiments of any of the aforesaid methods or uses, the cells expressing the CAR molecule are administered in combination with an agent that treats the disease associated with expression of the tumor antigen, e.g., any of the second or third therapies disclosed herein. Additional exemplary combinations include one or more of the following.

[1100] In another embodiment, the cell expressing the CAR molecule, e.g., as described herein, can be administered in combination with another agent, e.g., a kinase inhibitor and/or checkpoint inhibitor described herein. In an embodiment, a cell expressing the CAR molecule can further express another agent, e.g., an agent which enhances the activity of a CAR-expressing cell.

[1101] For example, in one embodiment, the agent that enhances the activity of a CAR-expressing cell can be an agent which inhibits an inhibitory molecule (e.g., an immune inhibitor molecule). Examples of inhibitory molecules include PD1, PD-L1, CTLA-4, TIM-3, CEACAM (e.g., CEACAM-1, CEACAM-3 and/or CEACAM-5), LAG-3, VISTA, BTLA, TIGIT, LAIR1, CD160, 2B4 and TGF beta.

[1102] In one embodiment, the agent that inhibits the inhibitory molecule is an inhibitory nucleic acid is a dsRNA, a siRNA, or a shRNA. In embodiments, the inhibitory nucleic acid is linked to the nucleic acid that encodes a component of the CAR molecule. For example, the inhibitory molecule can be expressed on the CAR-expressing cell.

[1103] In another embodiment, the agent which inhibits an inhibitory molecule, e.g., is a molecule described herein, e.g., an agent that comprises a first polypeptide, e.g., an inhibitory molecule, associated with a second polypeptide that provides a positive signal to the cell, e.g., an intracellular signaling domain described herein. In one embodiment, the agent comprises a first polypeptide, e.g., of an inhibitory molecule such as PD-1, PD-L1, CTLA-4, TIM-3, CEACAM (e.g., CEACAM-1, CEACAM-3 and/or CEACAM-5), LAG-3, VISTA, BTLA, TIGIT, LAIR1, CD160, 2B4 or TGF beta, or a fragment of any of these (e.g., at least a portion of the extracellular domain of any of these), and a second polypeptide which is an intracellular signaling domain described herein (e.g., comprising a costimulatory domain (e.g., 41BB, CD27 or CD28, e.g., as described herein) and/or a primary signaling domain (e.g., a CD3 zeta signaling domain described herein). In one embodiment, the agent comprises a first polypeptide of PD1 or a fragment thereof (e.g., at least a portion of the extracellular domain of PD1), and a second polypeptide of an intracellular signaling domain described herein (e.g., a CD28 signaling domain described herein and/or a CD3 zeta signaling domain described herein).

[1104] In one embodiment, the CAR-expressing immune effector cell of the present invention, e.g., T cell or NK cell, is administered to a subject that has received a previous stem cell transplantation, e.g., autologous stem cell transplantation.

[1105] In one embodiment, the CAR-expressing immune effector cell of the present invention, e.g., T cell or NK cells, is administered to a subject that has received a previous dose of melphalan.

[1106] In one embodiment, the cell expressing a CAR molecule, e.g., a CAR molecule described herein, is administered in combination with an agent that increases the efficacy of a cell expressing a CAR molecule, e.g., an agent described herein.

[1107] In one embodiment, the cells expressing a CAR molecule are administered in combination with a low, immune enhancing dose of an mTOR inhibitor. While not wishing to be bound by theory, it is believed that treatment with a low, immune enhancing, dose (e.g., a dose that is insufficient to completely suppress the immune system but sufficient to improve immune function) is accompanied by a decrease in PD-1 positive T cells or an increase in PD-1 negative cells. PD-1 positive T cells, but not PD-1 negative T cells, can be exhausted by engagement with cells which express a PD-1 ligand, e.g., PD-L1 or PD-L2.

[1108] In an embodiment this approach can be used to optimize the performance of CAR cells described herein in the subject. While not wishing to be bound by theory, it is believed that, in an embodiment, the performance of endogenous, non-modified immune effector cells, e.g., T cells or NK cells, is improved. While not wishing to be bound by theory, it is believed that, in an embodiment, the performance of a target antigen CAR-expressing cell is improved. In other embodiments, cells, e.g., T cells or NK cells, which have, or will be engineered to express a CAR, can be treated ex vivo by contact with an amount of an mTOR inhibitor that increases the number of PD1 negative immune effector cells, e.g., T cells or increases the ratio of PD1 negative immune effector cells, e.g., T cells/PD1 positive immune effector cells, e.g., T cells.

[1109] In an embodiment, administration of a low, immune enhancing, dose of an mTOR inhibitor, e.g., an allosteric inhibitor, e.g., RAD001, or a catalytic inhibitor, is initiated prior to administration of an CAR expressing cell described herein, e.g., T cells or NK cells. In an embodiment, the CAR cells are administered after a sufficient time, or sufficient dosing, of an mTOR inhibitor, such that the level of PD1 negative immune effector cells, e.g., T cells or NK cells, or the ratio of PD1 negative immune effector cells, e.g., T cells/PD1 positive immune effector cells, e.g., T cells, has been, at least transiently, increased.

[1110] In an embodiment, the cell, e.g., T cell or NK cell, to be engineered to express a CAR, is harvested after a sufficient time, or after sufficient dosing of the low, immune enhancing, dose of an mTOR inhibitor, such that the level of PD1 negative immune effector cells, e.g., T cells, or the ratio of PD1 negative immune effector cells, e.g., T cells/PD1 positive immune effector cells, e.g., T cells, in the subject or harvested from the subject has been, at least transiently, increased.

[1111] In one embodiment, the cell expressing a CAR molecule is administered in combination with an agent that ameliorates one or more side effect associated with administration of a cell expressing a CAR molecule, e.g., an agent described herein.

[1112] In one embodiment, the cell expressing a CAR molecule is administered in combination with an agent that treats the disease associated with a cancer associated antigen as described herein, e.g., an agent described herein.

[1113] In one embodiment, a cell expressing two or more CAR molecules, e.g., as described herein, is administered to a subject in need thereof to treat cancer. In one embodiment, a population of cells including a CAR expressing cell, e.g., as described herein, is administered to a subject in need thereof to treat cancer.

[1114] In one embodiment, the cell expressing a CAR molecule, is administered at a dose and/or dosing schedule described herein.

[1115] In one embodiment, the CAR molecule is introduced into immune effector cells (e.g., T cells, NK cells), e.g., using in vitro transcription, and the subject (e.g., human) receives an initial administration of cells comprising a CAR molecule and one or more subsequent administrations of cells comprising a CAR molecule wherein the one or more subsequent administrations are administered less than 15 days, e.g., 14, 13, 12, 11, 10, 9, 8, 7, 6, 5, 4, 3, or 2 days after the previous administration. In one embodiment, more than one administration of cells comprising a CAR molecule are administered to the subject (e.g., human) per week, e.g., 2, 3, or 4 administrations of cells comprising a CAR molecule are administered per week. In one embodiment, the subject (e.g., human subject) receives more than one administration of cells comprising a CAR molecule per week (e.g., 2, 3 or 4 administrations per week) (also referred to herein as a cycle), followed by a week of no administration of cells comprising a CAR molecule and then one or more additional administration of cells comprising a CAR molecule (e.g., more than one administration of the cells comprising a CAR molecule per week) is administered to the subject. In another embodiment, the subject (e.g., human subject) receives more than one cycle of cells comprising a CAR molecule, and the time between each cycle is less than 10, 9, 8, 7, 6, 5, 4, or 3 days. In one embodiment, the cells comprising a CAR molecule are administered every other day for 3 administrations per week. In one embodiment, the cells comprising a CAR molecule are administered for at least two, three, four, five, six, seven, eight or more weeks.

[1116] In one embodiment, the cells expressing a CAR molecule are administered as a first line treatment for the disease, e.g., the cancer, e.g., the cancer described herein. In another embodiment, the cells expressing a CAR molecule are administered as a second, third, fourth line treatment for the disease, e.g., the cancer, e.g., the cancer described herein.

[1117] In one embodiment, a population of cells described herein is administered.

[1118] In another aspect, the invention pertains to the isolated nucleic acid molecule encoding a CAR of the invention, the isolated polypeptide molecule of a CAR of the invention, the vector comprising a CAR of the invention, and the cell comprising a CAR of the invention for use as a medicament.

[1119] In another aspect, the invention pertains to a the isolated nucleic acid molecule encoding a CAR of the invention, the isolated polypeptide molecule of a CAR of the invention, the vector comprising a CAR of the invention, and the cell comprising a CAR of the invention for use in the treatment of a disease expressing a cancer associated antigen as described herein.

[1120] In another aspect, the invention pertains to a cell expressing a CAR molecule for use as a medicament in combination with a cytokine, e.g., IL-7, IL-15 and/or IL-21 as described herein. In another aspect, the invention pertains to a cytokine described herein for use as a medicament in combination with a cell expressing a CAR molecule described herein.

[1121] In another aspect, the invention pertains to a cell expressing a CAR molecule for use as a medicament in combination with a kinase inhibitor and/or a checkpoint inhibitor as described herein. In another aspect, the invention pertains to a kinase inhibitor and/or a checkpoint inhibitor described herein for use as a medicament in combination with a cell expressing a CAR molecule described herein.

[1122] In another aspect, the invention pertains to a cell expressing a CAR molecule for use in combination with a cytokine, e.g., IL-7, IL-15 and/or IL-21 as described herein, in the treatment of a disease expressing a tumor antigen targeted by the CAR. In another aspect, the invention pertains to a cytokine described herein for use in combination with a cell expressing a CAR molecule described herein, in the treatment of a disease expressing a tumor antigen targeted by the CAR.

[1123] In another aspect, the invention pertains to a cell expressing a CAR molecule for use in combination with a kinase inhibitor and/or a checkpoint inhibitor as described herein, in the treatment of a disease expressing a tumor antigen targeted by the CAR. In another aspect, the invention pertains to a kinase inhibitor and/or a checkpoint inhibitor described herein for use in combination with a cell expressing a CAR molecule described herein, in the treatment of a disease expressing a tumor antigen targeted by the CAR.

[1124] In another aspect, the present invention provides a method comprising administering a CAR molecule or a cell comprising a nucleic acid encoding a CAR molecule. In one embodiment, the subject has a disorder described herein, e.g., the subject has cancer, e.g., the subject has a cancer and has tumor-supporting cells which express a tumor-supporting antigen described herein. In one embodiment, the subject is a human.

[1125] In another aspect, the invention pertains to a method of treating a subject having a disease associated with expression of a tumor-supporting antigen as described herein comprising administering to the subject an effective amount of a cell comprising a CAR molecule.

[1126] In yet another aspect, the invention features a method of treating a subject having a disease associated with expression of a tumor-supporting antigen, comprising administering to the subject an effective amount of a cell, e.g., an immune effector cell (e.g., a population of immune effector cells) comprising a CAR molecule, wherein the CAR molecule comprises an antigen binding domain, a transmembrane domain, and an intracellular domain, said intracellular domain comprises a costimulatory domain and/or a primary signaling domain, wherein said antigen binding domain binds to the tumor-supporting antigen associated with the disease, e.g. a tumor-supporting antigen as described herein.

[1127] In a related aspect, the invention features a method of treating a subject having a disease associated with expression of a tumor-supporting antigen. The method comprises administering to the subject an effective amount of a cell, e.g., an immune effector cell (e.g., a population of immune effector cells) comprising a CAR molecule in combination with an agent that increases the efficacy of the immune cell, wherein:

[1128] the CAR molecule comprises an antigen binding domain, a transmembrane domain, and an intracellular domain comprising a costimulatory domain and/or a primary signaling domain, wherein said antigen binding domain binds to the tumor-supporting antigen associated with the disease, e.g. a tumor-supporting antigen as disclosed herein; and

[1129] the agent that increases the efficacy of the immune cell is chosen from one or more of:

[1130] a protein phosphatase inhibitor;

[1131] a kinase inhibitor;

[1132] a cytokine;

[1133] an inhibitor of an immune inhibitory molecule; or

[1134] an agent that decreases the level or activity of a T_{REG} cell.

[1135] In a related aspect, the invention features a method of treating a subject having a disease associated with expression of a tumor-supporting antigen, comprising administering to the subject an effective amount of a cell, e.g., an immune effector cell (e.g., a population of immune effector cells) comprising a CAR molecule:

[1136] the CAR molecule comprises an antigen binding domain, a transmembrane domain, and an intracellular domain comprising a costimulatory domain and/or a primary signaling domain, wherein said antigen binding domain binds to the tumor-supporting antigen associated with the disease, e.g., a tumor-supporting antigen as disclosed herein; and

[1137] the antigen binding domain of the CAR molecule has a binding affinity at least 5-fold less than an antibody from which the antigen binding domain is derived.

[1138] In another aspect, the invention features a composition comprising an immune effector cell (e.g., a population of immune effector cells) comprising a CAR molecule for use in the treatment of a subject having a disease associated with expression of a tumor-supporting antigen, e.g., a disorder as described herein.

[1139] In any of the aforesaid methods or uses, the disease associated with expression of the tumor-supporting antigen is selected from the group consisting of a proliferative disease, a precancerous condition, a cancer, and a non-cancer related indication associated with expression of the tumor-supporting antigen. In an embodiment, the disease associated with a tumor-supporting antigen described herein is a solid tumor.

[1140] In one embodiment of the methods or uses described herein, the CAR molecule is administered in combination with another agent. In one embodiment, the agent can be a kinase inhibitor, e.g., a CDK4/6 inhibitor, a BTK inhibitor, an mTOR inhibitor, a MNK inhibitor, or a dual PI3K/mTOR inhibitor, and combinations thereof. In one embodiment, the kinase inhibitor is a CDK4 inhibitor, e.g., a CDK4 inhibitor described herein, e.g., a CD4/6 inhibitor, such as, e.g., 6-Acetyl-8-cyclopentyl-5-methyl-2-(5-piperazin-1-yl-pyridin-2-ylamino)-8H-pyrido[2,3-d]pyrimidin-7-one, hydrochloride (also referred to as palbociclib or PD0332991). In one embodiment, the kinase inhibitor is a BTK inhibitor, e.g., a BTK inhibitor described herein, such as, e.g., ibrutinib. In one embodiment, the kinase inhibitor is an mTOR inhibitor, e.g., an mTOR inhibitor described herein, such as, e.g., rapamycin, a rapamycin analog, OSI-027. The mTOR inhibitor can be, e.g., an mTORC1 inhibitor and/or an mTORC2 inhibitor, e.g., an mTORC1 inhibitor and/or mTORC2 inhibitor described herein. In one embodiment, the kinase inhibitor is a MNK inhibitor, e.g., a MNK inhibitor described herein, such as, e.g., 4-amino-5-(4-fluoroanilino)-pyrazolo [3,4-d] pyrimidine. The MNK inhibitor can be, e.g., a MNK1a, MNK1b, MNK2a and/or MNK2b inhibitor. The dual PI3K/mTOR inhibitor can be, e.g., PF-04695102.

[1141] In one embodiment of the methods or uses described herein, the kinase inhibitor is a CDK4 inhibitor selected from aloisine A; flavopiridol or HMR-1275, 2-(2-chlorophenyl)-5,7-dihydroxy-8-[(3S,4R)-3-hydroxy-1-methyl-4-piperidinyl]-4-chromenone; crizotinib (PF-02341066; 2-(2-Chlorophenyl)-5,7-dihydroxy-8-[(2R,3S)-2-(hydroxymethyl)-1-methyl-3-pyrrolidinyl]-4H-1-benzopyran-4-one, hydrochloride (P276-00); 1-methyl-5-[[2-[5-(trifluoromethyl)-1H-imidazol-2-yl]-4-pyridinyl]oxy]-N-[4-(trifluoromethyl)phenyl]-1H-benzimidazol-2-amine (RAF265); indisulam (E7070); roscovitine (CYC202); palbociclib (PD0332991); dinaciclib (SCH727965); N-[5-[[(5-tert-butyloxazol-2-yl)methyl]thio]thiazol-2-yl]piperidine-4-carboxamide (BMS 387032); 4-[[9-chloro-7-(2,6-difluorophenyl)-5H-pyrimido[5,4-d][2]benzazepin-2-yl]amino]-benzoic acid (MLN8054); 5-[3-(4,6-difluoro-1H-benzimidazol-2-yl)-1H-indazol-5-yl]-N-ethyl-4-methyl-3-pyridinemethanamine (AG-024322); 4-(2,6-dichlorobenzoylamino)-1H-pyrazole-3-carboxylic acid N-(piperidin-4-yl)amide (AT7519); 4-[2-methyl-1-(1-methylethyl)-1H-imidazol-5-yl]-N-[4-(methylsulfonyl)phenyl]-2-pyrimidinamine (AZD5438); and XL281 (BMS908662).

[1142] In one embodiment of the methods or uses described herein, the kinase inhibitor is a CDK4 inhibitor, e.g., palbociclib (PD0332991), and the palbociclib is administered at a dose of about 50 mg, 60 mg, 70 mg, 75 mg, 80 mg, 90 mg, 100 mg, 105 mg, 110 mg, 115 mg, 120 mg, 125 mg, 130 mg, 135 mg (e.g., 75 mg, 100 mg or 125 mg) daily for a period of time, e.g., daily for 14-21 days of a 28 day cycle, or daily for 7-12 days of a 21 day cycle. In one embodiment, 1, 2, 3, 4, 5, 6, 7, 8, 9, 10, 11, 12 or more cycles of palbociclib are administered.

[1143] In one embodiment of the methods or uses described herein, the kinase inhibitor is a BTK inhibitor selected from ibrutinib (PCI-32765); GDC-0834; RN-486; CGI-560; CGI-1764; HM-71224; CC-292; ONO-4059; CNX-774; and LFM-A13. In one embodiment, the BTK inhibitor does not reduce or inhibit the kinase activity of interleukin-2-inducible kinase (ITK), and is selected from GDC-0834; RN-486; CGI-560; CGI-1764; HM-71224; CC-292; ONO-4059; CNX-774; and LFM-A13.

[1144] In one embodiment of the methods or uses described herein, the kinase inhibitor is a BTK inhibitor, e.g., ibrutinib (PCI-32765), and the ibrutinib is administered at a dose of about 250 mg, 300 mg, 350 mg, 400 mg, 420 mg, 440 mg, 460 mg, 480 mg, 500 mg, 520 mg, 540 mg, 560 mg, 580 mg, 600 mg (e.g., 250 mg, 420 mg or 560 mg) daily for a period of time, e.g., daily for 21 day cycle, or daily for 28 day cycle. In one embodiment, 1, 2, 3, 4, 5, 6, 7, 8, 9, 10, 11, 12 or more cycles of ibrutinib are administered.

[1145] In one embodiment of the methods or uses described herein, the kinase inhibitor is a BTK inhibitor that does not inhibit the kinase activity of ITK, e.g., RN-486, and RN-486 is administered at a dose of about 100 mg, 110 mg, 120 mg, 130 mg, 140 mg, 150 mg, 160 mg, 170 mg, 180 mg, 190 mg, 200 mg, 210 mg, 220 mg, 230 mg, 240 mg, 250 mg (e.g., 150 mg, 200 mg or 250 mg) daily for a period of time, e.g., daily a 28 day cycle. In one embodiment, 1, 2, 3, 4, 5, 6, 7, or more cycles of RN-486 are administered.

[1146] In one embodiment of the methods or uses described herein, the kinase inhibitor is an mTOR inhibitor selected from temsirolimus; ridaforolimus (1R,2R,4S)-4-[(2R)-2 [(1R,9S,12S,15R,16E,18R,19R,21R, 23S,24E,26E,28Z,30S,32S,35R)-1,18-dihydroxy-19,30- dimethoxy-15,17,21,23, 29,35-hexamethyl-2,3,10,14,20-pentaoxo-11,36-dioxa-4-azatricyclo[30.3.1.0^{4,9}] hexatriaconta-16,24,26,28-tetraen-12-yl]propyl]-2-methoxycyclohexyl dimethylphosphinate, also known as AP23573 and MK8669; everolimus (RAD001); rapamycin (AY22989); simapimod; (5-{2,4-bis[(3S)-3-methylmorpholin-4-yl]pyrido[2,3-d]pyrimidin-7-yl}-2-methoxyphenyl)methanol (AZD8055); 2-amino-8-[trans-4-(2-hydroxyethoxy)cyclohexyl]-6-(6-methoxy-3-pyridinyl)-4-methyl-pyrido[2,3-d]pyrimidin-7(8H)-one (PF04691502); and N²-[1,4-dioxo-4-[[4-(4-oxo-8-phenyl-4H-1-benzopyran-2-yl)morpholinium-4-yl]methoxy]butyl]-L-arginylglycyl-L-α-aspartylL-serine- (SEQ ID NO: 112), inner salt (SF1126); and XL765.

[1147] In one embodiment of the methods or uses described herein, the kinase inhibitor is an mTOR inhibitor, e.g., rapamycin, and the rapamycin is administered at a dose of about 3 mg, 4 mg, 5 mg, 6 mg, 7 mg, 8 mg, 9 mg, 10 mg (e.g., 6 mg) daily for a period of time, e.g., daily for 21 day cycle, or daily for 28 day cycle. In one embodiment, 1, 2, 3, 4, 5, 6, 7, 8, 9, 10, 11, 12 or more cycles of rapamycin are administered. In one embodiment, the kinase inhibitor is an mTOR inhibitor, e.g., everolimus and the everolimus is administered at a dose of about 2 mg, 2.5 mg, 3 mg, 4 mg, 5 mg, 6 mg, 7 mg, 8 mg, 9 mg, 10 mg, 11 mg, 12 mg, 13 mg, 14 mg, 15 mg (e.g., 10 mg) daily for a period of time, e.g., daily for 28 day cycle. In one embodiment, 1, 2, 3, 4, 5, 6, 7, 8, 9, 10, 11, 12 or more cycles of everolimus are administered.

[1148] In one embodiment of the methods or uses described herein, the kinase inhibitor is an MNK inhibitor selected from CGP052088; 4-amino-3-(p-fluorophenylamino)-pyrazolo [3,4-d] pyrimidine (CGP57380); cercosporamide; ETC-1780445-2; and 4-amino-5-(4-fluoroanilino)-pyrazolo [3,4-d] pyrimidine.

[1149] In one embodiment of the methods or uses described herein, the kinase inhibitor is a dual phosphatidylinositol 3-kinase (PI3K) and mTOR inhibitor selected from 2-Amino-8-[trans-4-(2-hydroxyethoxy)cyclohexyl]-6-(6-methoxy-3-pyridinyl)-4-methyl-pyrido[2,3-d]pyrimidin-7(8H)-one (PF-04691502); N-[4-[[4-(Dimethylamino)-1-piperidinyl]carbonyl]phenyl]-N-[4-(4,6-di-4-morpholinyl-1,3,5-triazin-2-yl)phenyl]urea (PF-05212384, PKI-587); 2-Methyl-2-{4-[3-methyl-2-oxo-8-(quinolin-3-yl)-2,3-dihydro-1H-imidazo[4,5-c]quinolin-1-yl]phenyl}propanenitrile (BEZ-235); apitolisib (GDC-0980, RG7422); 2,4-Difluoro-N-{2-(methyloxy)-5-[4-(4-pyridazinyl)-6-quinolinyl]-3-pyridinyl}benzenesulfonamide (GSK2126458); 8-(6-methoxypyridin-3-yl)-3-methyl-1-(4-(piperazin-1-yl)-3-(trifluoromethyl)phenyl)-1H-imidazo[4,5-c]quinolin-2(3H)-one Maleic acid (NVP-BGT226); 3-[4-(4-Morpholinylpyrido[3′,2′:4,5]furo[3,2-d]pyrimidin-2-yl]phenol (PI-103); 5-(9-isopropyl-8-methyl-2-morpholino-9H-purin-6-yl)pyrimidin-2-amine (VS-5584, SB2343); and N-[2-[(3,5-Dimethoxyphenyl)amino]quinoxalin-3-yl]-4-[(4-methyl-3-methoxyphenyl)carbonyl]aminophenylsulfonamide (XL765).

[1150] In one embodiment of the methods or uses described herein, a CAR expressing immune effector cell described herein is administered to a subject in combination with a protein tyrosine phosphatase inhibitor, e.g., a protein tyrosine phosphatase inhibitor described herein. In one embodiment, the protein tyrosine phosphatase inhibitor is an SHP-1 inhibitor, e.g., an SHP-1 inhibitor described herein, such as, e.g., sodium stibogluconate. In one embodiment, the protein tyrosine phosphatase inhibitor is an SHP-2 inhibitor.

[1151] In one embodiment of the methods or uses described herein, the CAR molecule is administered in combination with another agent, and the agent is a cytokine. The cytokine can be, e.g., IL-7, IL-15, IL-21, or a combination thereof. In another embodiment, the CAR molecule is administered in combination with a checkpoint inhibitor, e.g., a checkpoint inhibitor described herein. For example, in one embodiment, the check point inhibitor inhibits an inhibitory molecule selected from PD-1, PD-L1, CTLA-4, TIM-3, CEACAM (e.g., CEACAM-1, CEACAM-3 and/or CEACAM-5), LAG-3, VISTA, BTLA, TIGIT, LAIR1, CD160, 2B4 and TGF beta.

[1152] In further aspects, a CAR-expressing cell described herein may be used in a treatment regimen in combination with surgery, chemotherapy, radiation, immunosuppressive agents, such as cyclosporin, azathioprine, methotrexate, mycophenolate, and FK506, antibodies, or other immunoablative agents such as CAMPATH, anti-CD3 antibodies or other antibody therapies, cytoxin, fludarabine, cyclosporin, FK506, rapamycin, mycophenolic acid, steroids, FR901228, cytokines, and irradiation. peptide vaccine, such as that described in Izumoto et al. 2008 J Neurosurg 108:963-971.

[1153] In one embodiment, a CAR-expressing cell described herein can be used in combination with a chemotherapeutic agent. Exemplary chemotherapeutic agents include an anthracycline (e.g., doxorubicin (e.g., liposomal doxorubicin)). a vinca alkaloid (e.g., vinblastine, vincristine, vindesine, vinorelbine), an alkylating agent (e.g., cyclophosphamide, decarbazine, melphalan, ifosfamide, temozolomide), an immune cell antibody (e.g., alemtuzamab, gemtuzumab, rituximab, ofatumumab, tositumomab, brentuximab), an antimetabolite (including, e.g., folic acid antagonists, pyrimidine analogs, purine analogs and adenosine deaminase inhibitors (e.g., fludarabine)), an mTOR inhibitor, a TNFR glucocorticoid induced TNFR related protein (GITR) agonist, a proteasome inhibitor (e.g., aclacinomycin A, gliotoxin or bortezomib), an immunomodulator such as thalidomide or a thalidomide derivative (e.g., lenalidomide).

[1154] General Chemotherapeutic agents considered for use in combination therapies include anastrozole (Arimidex®), bicalutamide (Casodex®), bleomycin sulfate (Blenoxane®), busulfan (Myleran®), busulfan injection (Busulfex®), capecitabine (Xeloda®), N4-pentoxycarbonyl-5-deoxy-5-fluorocytidine, carboplatin (Paraplatin®), carmustine (BiCNU®), chlorambucil (Leukeran®), cisplatin (Platinol®), cladribine (Leustatin®), cyclophosphamide (Cytoxan® or Neosar®), cytarabine, cytosine arabinoside (Cytosar-U®), cytarabine liposome injection (DepoCyt®), dacarbazine (DTIC-Dome®), dactinomycin (Actinomycin D, Cosmegan), daunorubicin hydrochloride (Cerubidine®), daunorubicin citrate liposome injection (DaunoXome®), dexamethasone, docetaxel (Taxotere®), doxorubicin hydrochloride (Adriamycin®, Rubex®), etoposide (Vepesid®), fludarabine phosphate (Fludara®), 5-fluorouracil (Adrucil®, Efudex®), flutamide (Eulexin®), tezacitibine, Gemcitabine (difluorodeoxycitidine), hydroxyurea (Hydrea®), Idarubicin (Idamycin®), ifosfamide (IFEX®), irinotecan (Camptosar®), L-asparaginase (ELSPAR®), leucovorin calcium, melphalan (Alkeran®), 6-mercaptopurine (Purinethol®), methotrexate (Folex®), mitoxantrone (Novantrone®), mylotarg, paclitaxel (Taxol®), phoenix (Yttrium90/MX-DTPA), pentostatin, polifeprosan 20 with carmustine implant (Gliadel®), tamoxifen citrate (Nolvadex®), teniposide (Vumon®), 6-thioguanine, thiotepa, tirapazamine (Tirazone®), topotecan hydrochloride for injection (Hycamptin®), vinblastine (Velban®), vincristine (Oncovin®), and vinorelbine (Navelbine®).

[1155] Exemplary alkylating agents include, without limitation, nitrogen mustards, ethylenimine derivatives, alkyl sulfonates, nitrosoureas and triazenes): uracil mustard (Aminouracil Mustard®, Chlorethaminacil®, Demethyldopan®, Desmethyldopan®, Haemanthamine®, Nordopan®, Uracil nitrogen mustard®, Uracillost®, Uracilmostaza®, Uramustin®, Uramustine®), chlormethine (Mustargen®), cyclophosphamide (Cytoxan®, Neosar®, Clafen®, Endoxan®, Procytox®, Revimmune™), ifosfamide (Mitoxana®), melphalan (Alkeran®), Chlorambucil (Leukeran®), pipobroman (Amedel®, Vercyte®), triethylenemelamine (Hemel®, Hexalen®, Hexastat®), triethylenethiophosphoramine, Temozolomide (Temodar®), thiotepa (Thioplex®), busulfan (Busilvex®, Myleran®), carmustine (BiCNU®), lomustine (CeeNU®), streptozocin (Zanosar®), and Dacarbazine (DTIC-Dome®). Additional exemplary alkylating agents include, without limitation, Oxaliplatin (Eloxatin®); Temozolomide (Temodar® and Temodal®); Dactinomycin (also known as actinomycin-D, Cosmegen®); Melphalan (also known as L-PAM, L-sarcolysin, and phenylalanine mustard, Alkeran®); Altretamine (also known as hexamethylmelamine (HMM), Hexalen®); Carmustine (BiCNU®); Bendamustine (Treanda®); Busulfan (Busulfex® and Myleran®); Carboplatin (Paraplatin®); Lomustine (also known as CCNU, CeeNU®); Cisplatin (also known as CDDP, Platinol® and Platinol®-AQ); Chlorambucil (Leukeran®); Cyclophosphamide (Cytoxan® and Neosar®); Dacarbazine (also known as DTIC, DIC and imidazole carboxamide, DTIC-Dome®); Altretamine (also known as hexamethylmelamine (HMM), Hexalen®); Ifosfamide (Ifex®); Prednumustine; Procarbazine (Matulane®); Mechlorethamine (also known as nitrogen mustard, mustine and mechloroethamine hydrochloride, Mustargen®); Streptozocin (Zanosar®); Thiotepa (also known as thiophosphoamide, TESPA and TSPA, Thioplex®); Cyclophosphamide (Endoxan®, Cytoxan®, Neosar®, Procytox®, Revimmune®); and Bendamustine HCl (Treanda®).

[1156] In embodiments, a CAR-expressing cell described herein is administered to a subject in combination with fludarabine, cyclophosphamide, and/or rituximab. In embodiments, a CAR-expressing cell described herein is administered to a subject in combination with fludarabine, cyclophosphamide, and rituximab (FCR). In embodiments, the subject has CLL. For example, the subject has a deletion in the short arm of chromosome 17 (del(17p), e.g., in a leukemic cell). In other examples, the subject does not have a del(17p). In embodiments, the subject comprises a leukemic cell comprising a mutation in the immunoglobulin heavy-chain variable-region (IgV_{H}) gene. In other embodiments, the subject does not comprise a leukemic cell comprising a mutation in the immunoglobulin heavy-chain variable-region (IgV_{H}) gene. In embodiments, the fludarabine is administered at a dosage of about 10-50 mg/m² (e.g., about 10-15, 15-20, 20-25, 25-30, 30-35, 35-40, 40-45, or 45-50 mg/m²), e.g., intravenously. In embodiments, the cyclophosphamide is administered at a dosage of about 200-300 mg/m² (e.g., about 200-225, 225-250, 250-275, or 275-300 mg/m²), e.g., intravenously. In embodiments, the rituximab is administered at a dosage of about 400-600 mg/m2 (e.g., 400-450, 450-500, 500-550, or 550-600 mg/m²), e.g., intravenously.

[1157] In embodiments, a CAR-expressing cell described herein is administered to a subject in combination with bendamustine and rituximab. In embodiments, the subject has CLL. For example, the subject has a deletion in the short arm of chromosome 17 (del(17p), e.g., in a leukemic cell). In other examples, the subject does not have a del(17p). In embodiments, the subject comprises a leukemic cell comprising a mutation in the immunoglobulin heavy-chain variable-region (IgV_{H}) gene. In other embodiments, the subject does not comprise a leukemic cell comprising a mutation in the immunoglobulin heavy-chain variable-region (IgV_{H}) gene. In embodiments, the bendamustine is administered at a dosage of about 70-110 mg/m2 (e.g., 70-80, 80-90, 90-100, or 100-110 mg/m2), e.g., intravenously. In embodiments, the rituximab is administered at a dosage of about 400-600 mg/m2 (e.g., 400-450, 450-500, 500-550, or 550-600 mg/m²), e.g., intravenously.

[1158] In embodiments, a CAR-expressing cell described herein is administered to a subject in combination with rituximab, cyclophosphamide, doxorubicine, vincristine, and/or a corticosteroid (e.g., prednisone). In embodiments, a CAR-expressing cell described herein is administered to a subject in combination with rituximab, cyclophosphamide, doxorubicine, vincristine, and prednisone (R-CHOP). In embodiments, the subject has diffuse large B-cell lymphoma (DLBCL). In embodiments, the subject has nonbulky limited-stage DLBCL (e.g., comprises a tumor having a size/diameter of less than 7 cm). In embodiments, the subject is treated with radiation in combination with the R-CHOP. For example, the subject is administered R-CHOP (e.g., 1-6 cycles, e.g., 1, 2, 3, 4, 5, or 6 cycles of R-CHOP), followed by radiation. In some cases, the subject is administered R-CHOP (e.g., 1-6 cycles, e.g., 1, 2, 3, 4, 5, or 6 cycles of R-CHOP) following radiation.

[1159] In embodiments, a CAR-expressing cell described herein is administered to a subject in combination with etoposide, prednisone, vincristine, cyclophosphamide, doxorubicin, and/or rituximab. In embodiments, a CAR-expressing cell described herein is administered to a subject in combination with etoposide, prednisone, vincristine, cyclophosphamide, doxorubicin, and rituximab (EPOCH-R). In embodiments, a CAR-expressing cell described herein is administered to a subject in combination with dose-adjusted EPOCH-R (DA-EPOCH-R). In embodiments, the subject has a B cell lymphoma, e.g., a Myc-rearranged aggressive B cell lymphoma.

[1160] In embodiments, a CAR-expressing cell described herein is administered to a subject in combination with rituximab and/or lenalidomide. Lenalidomide ((RS)-3-(4-Amino-1-oxo 1,3-dihydro-2H-isoindol-2-yl)piperidine-2,6-dione) is an immunomodulator. In embodiments, a CAR-expressing cell described herein is administered to a subject in combination with rituximab and lenalidomide. In embodiments, the subject has follicular lymphoma (FL) or mantle cell lymphoma (MCL). In embodiments, the subject has FL and has not previously been treated with a cancer therapy. In embodiments, lenalidomide is administered at a dosage of about 10-20 mg (e.g., 10-15 or 15-20 mg), e.g., daily. In embodiments, rituximab is administered at a dosage of about 350-550 mg/m² (e.g., 350-375, 375-400, 400-425, 425-450, 450-475, or 475-500 mg/m²), e.g., intravenously.

[1161] Exemplary mTOR inhibitors include, e.g., temsirolimus; ridaforolimus (formally known as deferolimus, (1R,2R,4S)-4-[(2R)-2 [(1R,9S,12S,15R,16E,18R,19R,21R,23S,24E,26E,28Z,30S,32S,35R)-1,18-dihydroxy-19,30-dimethoxy-15,17,21,23, 29,35-hexamethyl-2,3,10,14,20-pentaoxo-11,36-dioxa-4-azatricyclo[30.3.1.0^{4,9}] hexatriaconta-16,24,26,28-tetraen-12-yl]propyl]-2-methoxycyclohexyl dimethylphosphinate, also known as AP23573 and MK8669, and described in PCT Publication No. WO 03/064383); everolimus (Afinitor® or RAD001); rapamycin (AY22989, Sirolimus®); simapimod (CAS 164301-51-3); emsirolimus, (5-{2,4-Bis[(3S)-3-methylmorpholin-4-yl]pyrido[2,3-d]pyrimidin-7-yl}-2-methoxyphenyl)methanol (AZD8055); 2-Amino-8-[trans-4-(2-hydroxyethoxy)cyclohexyl]-6-(6-methoxy-3-pyridinyl)-4-methyl-pyrido[2,3-d]pyrimidin-7(8H)-one (PF04691502, CAS 1013101-36-4); and N²-[1,4-dioxo-4-[[4-(4-oxo-8-phenyl-4H-1-benzopyran-2-yl)morpholinium-4-yl]methoxy]butyl]-L-arginylglycyl-L-α-aspartylL-serine- (SEQ ID NO: 112), inner salt (SF1126, CAS 936487-67-1), and XL765.

[1162] Exemplary immunomodulators include, e.g., afutuzumab (available from Roche®); pegfilgrastim (Neulasta®); lenalidomide (CC-5013, Revlimid®); thalidomide (Thalomid®), actimid (CC4047); and IRX-2 (mixture of human cytokines including interleukin 1, interleukin 2, and interferon γ, CAS 951209-71-5, available from IRX Therapeutics).

[1163] Exemplary anthracyclines include, e.g., doxorubicin (Adriamycin® and Rubex®); bleomycin (lenoxane®); daunorubicin (dauorubicin hydrochloride, daunomycin, and rubidomycin hydrochloride, Cerubidine®); daunorubicin liposomal (daunorubicin citrate liposome, DaunoXome®); mitoxantrone (DHAD, Novantrone®); epirubicin (Ellence™); idarubicin (Idamycin®, Idamycin PFS®); mitomycin C (Mutamycin®); geldanamycin; herbimycin; ravidomycin; and desacetylravidomycin.

[1164] Exemplary vinca alkaloids include, e.g., vinorelbine tartrate (Navelbine®), Vincristine (Oncovin®), and Vindesine (Eldisine®)); vinblastine (also known as vinblastine sulfate, vincaleukoblastine and VLB, Alkaban-AQ® and Velban®); and vinorelbine (Navelbine®).

[1165] Exemplary proteosome inhibitors include bortezomib (Velcade®); carfilzomib (PX-171-007, (S)-4-Methyl-N—((S)-1-(((S)-4-methyl-1-((R)-2-methyloxiran-2-yl)-1-oxopentan-2-yl)amino)-1-oxo-3-phenylpropan-2-yl)-2-((S)-2-(2-morpholinoacetamido)-4-phenylbutanamido)-pentanamide); marizomib (NPI-0052); ixazomib citrate (MLN-9708); delanzomib (CEP-18770); and O-Methyl-N-[(2-methyl-5-thiazolyl)carbonyl]-L-seryl-O-methyl-N-[(1S)-2-[(2R)-2-methyl-2-oxiranyl]-2-oxo-1-(phenylmethyl)ethyl]-L-serinamide (ONX-0912).

[1166] In embodiments, a CAR-expressing cell described herein is administered to a subject in combination with brentuximab. Brentuximab is an antibody-drug conjugate of anti-CD30 antibody and monomethyl auristatin E. In embodiments, the subject has Hodgkin's lymphoma (HL), e.g., relapsed or refractory HL. In embodiments, the subject comprises CD30+ HL. In embodiments, the subject has undergone an autologous stem cell transplant (ASCT). In embodiments, the subject has not undergone an ASCT. In embodiments, brentuximab is administered at a dosage of about 1-3 mg/kg (e.g., about 1-1.5, 1.5-2, 2-2.5, or 2.5-3 mg/kg), e.g., intravenously, e.g., every 3 weeks.

[1167] In embodiments, a CAR-expressing cell described herein is administered to a subject in combination with brentuximab and dacarbazine or in combination with brentuximab and bendamustine. Dacarbazine is an alkylating agent with a chemical name of 5-(3,3-Dimethyl-1-triazenyl)imidazole-4-carboxamide. Bendamustine is an alkylating agent with a chemical name of 4-[5-[Bis(2-chloroethyl)amino]-1-methylbenzimidazol-2-yl]butanoic acid. In embodiments, the subject has Hodgkin's lymphoma (HL). In embodiments, the subject has not previously been treated with a cancer therapy. In embodiments, the subject is at least 60 years of age, e.g., 60, 65, 70, 75, 80, 85, or older. In embodiments, dacarbazine is administered at a dosage of about 300-450 mg/m² (e.g., about 300-325, 325-350, 350-375, 375-400, 400-425, or 425-450 mg/m²), e.g., intravenously. In embodiments, bendamustine is administered at a dosage of about 75-125 mg/m2 (e.g., 75-100 or 100-125 mg/m², e.g., about 90 mg/m²), e.g., intravenously. In embodiments, brentuximab is administered at a dosage of about 1-3 mg/kg (e.g., about 1-1.5, 1.5-2, 2-2.5, or 2.5-3 mg/kg), e.g., intravenously, e.g., every 3 weeks.

[1168] In some embodiments, a CAR-expressing cell described herein is administered to a subject in combination with a CD20 inhibitor, e.g., an anti-CD20 antibody (e.g., an anti-CD20 mono- or bispecific antibody) or a fragment thereof. Exemplary anti-CD20 antibodies include but are not limited to rituximab, ofatumumab, ocrelizumab, veltuzumab, obinutuzumab, TRU-015 (Trubion Pharmaceuticals), ocaratuzumab, and Pro131921 (Genentech). See, e.g., Lim et al. Haematologica. 95.1(2010):135-43.

[1169] In some embodiments, the anti-CD20 antibody comprises rituximab. Rituximab is a chimeric mouse/human monoclonal antibody IgG1 kappa that binds to CD20 and causes cytolysis of a CD20 expressing cell, e.g., as described in www.accessdata.fda.gov/drugsatfda_docs/label/2010/103705s53111bl.pdf. In embodiments, a CAR-expressing cell described herein is administered to a subject in combination with rituximab. In embodiments, the subject has CLL or SLL.

[1170] In some embodiments, rituximab is administered intravenously, e.g., as an intravenous infusion. For example, each infusion provides about 500-2000 mg (e.g., about 500-550, 550-600, 600-650, 650-700, 700-750, 750-800, 800-850, 850-900, 900-950, 950-1000, 1000-1100, 1100-1200, 1200-1300, 1300-1400, 1400-1500, 1500-1600, 1600-1700, 1700-1800, 1800-1900, or 1900-2000 mg) of rituximab. In some embodiments, rituximab is administered at a dose of 150 mg/m² to 750 mg/m², e.g., about 150-175 mg/m², 175-200 mg/m², 200-225 mg/m², 225-250 mg/m², 250-300 mg/m², 300-325 mg/m², 325-350 mg/m², 350-375 mg/m², 375-400 mg/m², 400-425 mg/m², 425-450 mg/m², 450-475 mg/m², 475-500 mg/m², 500-525 mg/m², 525-550 mg/m², 550-575 mg/m², 575-600 mg/m², 600-625 mg/m², 625-650 mg/m², 650-675 mg/m², or 675-700 mg/m², where m² indicates the body surface area of the subject. In some embodiments, rituximab is administered at a dosing interval of at least 4 days, e.g., 4, 7, 14, 21, 28, 35 days, or more. For example, rituximab is administered at a dosing interval of at least 0.5 weeks, e.g., 0.5, 1, 2, 3, 4, 5, 6, 7, 8 weeks, or more. In some embodiments, rituximab is administered at a dose and dosing interval described herein for a period of time, e.g., at least 2 weeks, e.g., at least 2, 3, 4, 5, 6, 7, 8, 9, 10, 11, 12, 13, 14, 15, 16, 17, 18, 19, 20 weeks, or greater. For example, rituximab is administered at a dose and dosing interval described herein for a total of at least 4 doses per treatment cycle (e.g., at least 4, 5, 6, 7, 8, 9, 10, 11, 12, 13, 14, 15, 16, or more doses per treatment cycle).

[1171] In some embodiments, the anti-CD20 antibody comprises ofatumumab. Ofatumumab is an anti-CD20 IgG1κ human monoclonal antibody with a molecular weight of approximately 149 kDa. For example, ofatumumab is generated using transgenic mouse and hybridoma technology and is expressed and purified from a recombinant murine cell line (NS0). See, e.g., www.accessdata.fda.gov/drugsatfda_docs/label/2009/125326lbl.pdf; and Clinical Trial Identifier number NCT01363128, NCT01515176, NCT01626352, and NCT01397591. In embodiments, a CAR-expressing cell described herein is administered to a subject in combination with ofatumumab. In embodiments, the subject has CLL or SLL.

[1172] In some embodiments, ofatumumab is administered as an intravenous infusion. For example, each infusion provides about 150-3000 mg (e.g., about 150-200, 200-250, 250-300, 300-350, 350-400, 400-450, 450-500, 500-550, 550-600, 600-650, 650-700, 700-750, 750-800, 800-850, 850-900, 900-950, 950-1000, 1000-1200, 1200-1400, 1400-1600, 1600-1800, 1800-2000, 2000-2200, 2200-2400, 2400-2600, 2600-2800, or 2800-3000 mg) of ofatumumab. In embodiments, ofatumumab is administered at a starting dosage of about 300 mg, followed by 2000 mg, e.g., for about 11 doses, e.g., for 24 weeks. In some embodiments, ofatumumab is administered at a dosing interval of at least 4 days, e.g., 4, 7, 14, 21, 28, 35 days, or more. For example, ofatumumab is administered at a dosing interval of at least 1 week, e.g., 1, 2, 3, 4, 5, 6, 7, 8, 9, 10, 11, 12, 24, 26, 28, 20, 22, 24, 26, 28, 30 weeks, or more. In some embodiments, ofatumumab is administered at a dose and dosing interval described herein for a period of time, e.g., at least 1 week, e.g., 1, 2, 3, 4, 5, 6, 7, 8, 9, 10, 11, 12, 13, 14, 15, 16, 17, 18, 19, 20, 22, 24, 26, 28, 30, 40, 50, 60 weeks or greater, or 1, 2, 3, 4, 5, 6, 7, 8, 9, 10, 11, 12 months or greater, or 1, 2, 3, 4, 5 years or greater. For example, ofatumumab is administered at a dose and dosing interval described herein for a total of at least 2 doses per treatment cycle (e.g., at least 2, 3, 4, 5, 6, 7, 8, 9, 10, 11, 12, 13, 14, 15, 16, 18, 20, or more doses per treatment cycle).

[1173] In some cases, the anti-CD20 antibody comprises ocrelizumab. Ocrelizumab is a humanized anti-CD20 monoclonal antibody, e.g., as described in Clinical Trials Identifier Nos. NCT00077870, NCT01412333, NCT00779220, NCT00673920, NCT01194570, and Kappos et al. Lancet. 19.378(2011):1779-87.

[1174] In some cases, the anti-CD20 antibody comprises veltuzumab. Veltuzumab is a humanized monoclonal antibody against CD20. See, e.g., Clinical Trial Identifier No. NCT00547066, NCT00546793, NCT01101581, and Goldenberg et al. Leuk Lymphoma. 51(5)(2010):747-55.

[1175] In some cases, the anti-CD20 antibody comprises GA101. GA101 (also called obinutuzumab or R05072759) is a humanized and glyco-engineered anti-CD20 monoclonal antibody. See, e.g., Robak. Curr. Opin. Investig. Drugs. 10.6(2009):588-96; Clinical Trial Identifier Numbers: NCT01995669, NCT01889797, NCT02229422, and NCT01414205; and www.accessdata.fda.gov/drugsatfda_docs/label/2013/125486s000lbl.pdf.

[1176] In some cases, the anti-CD20 antibody comprises AME-133v. AME-133v (also called LY2469298 or ocaratuzumab) is a humanized IgG1 monoclonal antibody against CD20 with increased affinity for the FcγRIIIa receptor and an enhanced antibody dependent cellular cytotoxicity (ADCC) activity compared with rituximab. See, e.g., Robak et al. BioDrugs 25.1(2011):13-25; and Forero-Torres et al. Clin Cancer Res. 18.5(2012):1395-403.

[1177] In some cases, the anti-CD20 antibody comprises PRO131921. PRO131921 is a humanized anti-CD20 monoclonal antibody engineered to have better binding to FcγRIIIa and enhanced ADCC compared with rituximab. See, e.g., Robak et al. BioDrugs 25.1(2011):13-25; and Casulo et al. Clin Immunol. 154.1(2014):37-46; and Clinical Trial Identifier No. NCT00452127.

[1178] In some cases, the anti-CD20 antibody comprises TRU-015. TRU-015 is an anti-CD20 fusion protein derived from domains of an antibody against CD20. TRU-015 is smaller than monoclonal antibodies, but retains Fc-mediated effector functions. See, e.g., Robak et al. BioDrugs 25.1(2011):13-25. TRU-015 contains an anti-CD20 single-chain variable fragment (scFv) linked to human IgG1 hinge, CH2, and CH3 domains but lacks CH1 and CL domains.

[1179] In some embodiments, an anti-CD20 antibody described herein is conjugated or otherwise bound to a therapeutic agent, e.g., a chemotherapeutic agent (e.g., cytoxan, fludarabine, histone deacetylase inhibitor, demethylating agent, peptide vaccine, anti-tumor antibiotic, tyrosine kinase inhibitor, alkylating agent, anti-microtubule or anti-mitotic agent), anti-allergic agent, anti-nausea agent (or anti-emetic), pain reliever, or cytoprotective agent described herein.

[1180] In embodiments, a CAR-expressing cell described herein is administered to a subject in combination with a B-cell lymphoma 2 (BCL-2) inhibitor (e.g., venetoclax, also called ABT-199 or GDC-0199;) and/or rituximab. In embodiments, a CAR-expressing cell described herein is administered to a subject in combination with venetoclax and rituximab. Venetoclax is a small molecule that inhibits the anti-apoptotic protein, BCL-2. The structure of venetoclax (4-(4-{[2-(4-chlorophenyl)-4,4-dimethylcyclohex-1-en-1-yl]methyl}piperazin-1-yl)-N-({3-nitro-4-[(tetrahydro-2H-pyran-4-ylmethyl)amino]phenyl}sulfonyl)-2-(1H-pyrrolo[2,3-b]pyridin-5-yloxy)benzamide) is shown below.

[chemical structure]

[1181] In embodiments, the subject has CLL. In embodiments, the subject has relapsed CLL, e.g., the subject has previously been administered a cancer therapy. In embodiments, venetoclax is administered at a dosage of about 15-600 mg (e.g., 15-20, 20-50, 50-75, 75-100, 100-200, 200-300, 300-400, 400-500, or 500-600 mg), e.g., daily. In embodiments, rituximab is administered at a dosage of about 350-550 mg/m2 (e.g., 350-375, 375-400, 400-425, 425-450, 450-475, or 475-500 mg/m2), e.g., intravenously, e.g., monthly

[1182] In an embodiment, cells expressing a CAR described herein are administered to a subject in combination with a molecule that decreases the Treg cell population. Methods that decrease the number of (e.g., deplete) Treg cells are known in the art and include, e.g., CD25 depletion, cyclophosphamide administration, modulating GITR function. Without wishing to be bound by theory, it is believed that reducing the number of Treg cells in a subject prior to apheresis or prior to administration of a CAR-expressing cell described herein reduces the number of unwanted immune cells (e.g., Tregs) in the tumor microenvironment and reduces the subject's risk of relapse. In one embodiment, cells expressing a CAR described herein are administered to a subject in combination with a molecule targeting GITR and/or modulating GITR functions, such as a GITR agonist and/or a GITR antibody that depletes regulatory T cells (Tregs). In embodiments, cells expressing a CAR described herein are administered to a subject in combination with cyclophosphamide. In one embodiment, the GITR binding molecules and/or molecules modulating GITR functions (e.g., GITR agonist and/or Treg depleting GITR antibodies) are administered prior to administration of the CAR-expressing cell. For example, in one embodiment, the GITR agonist can be administered prior to apheresis of the cells. In embodiments, cyclophosphamide is administered to the subject prior to administration (e.g., infusion or re-infusion) of the CAR-expressing cell or prior to apheresis of the cells. In embodiments, cyclophosphamide and an anti-GITR antibody are administered to the subject prior to administration (e.g., infusion or re-infusion) of the CAR-expressing cell or prior to apheresis of the cells. In one embodiment, the subject has cancer (e.g., a solid cancer or a hematological cancer such as ALL or CLL). In an embodiment, the subject has CLL. In embodiments, the subject has ALL. In embodiments, the subject has a solid cancer, e.g., a solid cancer described herein. Exemplary GITR agonists include, e.g., GITR fusion proteins and anti-GITR antibodies (e.g., bivalent anti-GITR antibodies) such as, e.g., a GITR fusion protein described in U.S. Pat. No. 6,111,090, European Patent No.: 090505B1, U.S. Pat. No. 8,586,023, PCT Publication Nos.: WO 2010/003118 and 2011/090754, or an anti-GITR antibody described, e.g., in U.S. Pat. No. 7,025,962, European Patent No.: 1947183B1, U.S. Pat. Nos. 7,812,135, 8,388,967, 8,591,886, European Patent No.: EP 1866339, PCT Publication No.: WO 2011/028683, PCT Publication No.: WO 2013/039954, PCT Publication No.: WO2005/007190, PCT Publication No.: WO 2007/133822, PCT Publication No.: WO2005/055808, PCT Publication No.: WO 99/40196, PCT Publication No.: WO 2001/03720, PCT Publication No.: WO99/20758, PCT Publication No.: WO2006/083289, PCT Publication No.: WO 2005/115451, U.S. Pat. No. 7,618,632, and PCT Publication No.: WO 2011/051726.

[1183] In one embodiment, a CAR expressing cell described herein is administered to a subject in combination with an mTOR inhibitor, e.g., an mTOR inhibitor described herein, e.g., a rapalog such as everolimus. In one embodiment, the mTOR inhibitor is administered prior to the CAR-expressing cell. For example, in one embodiment, the mTOR inhibitor can be administered prior to apheresis of the cells. In one embodiment, the subject has CLL.

[1184] In one embodiment, a CAR expressing cell described herein is administered to a subject in combination with a GITR agonist, e.g., a GITR agonist described herein. In one embodiment, the GITR agonist is administered prior to the CAR-expressing cell. For example, in one embodiment, the GITR agonist can be administered prior to apheresis of the cells. In one embodiment, the subject has CLL.

[1185] In one embodiment, a CAR-expressing cell described herein can be used in combination with a kinase inhibitor. In one embodiment, the kinase inhibitor is a CDK4 inhibitor, e.g., a CDK4 inhibitor described herein, e.g., a CD4/6 inhibitor, such as, e.g., 6-Acetyl-8-cyclopentyl-5-methyl-2-(5-piperazin-1-yl-pyridin-2-ylamino)-8H-pyrido[2,3-d]pyrimidin-7-one, hydrochloride (also referred to as palbociclib or PD0332991). In one embodiment, the kinase inhibitor is a BTK inhibitor, e.g., a BTK inhibitor described herein, such as, e.g., ibrutinib. In one embodiment, the kinase inhibitor is an mTOR inhibitor, e.g., an mTOR inhibitor described herein, such as, e.g., rapamycin, a rapamycin analog, OSI-027. The mTOR inhibitor can be, e.g., an mTORC1 inhibitor and/or an mTORC2 inhibitor, e.g., an mTORC1 inhibitor and/or mTORC2 inhibitor described herein. In one embodiment, the kinase inhibitor is a MNK inhibitor, e.g., a MNK inhibitor described herein, such as, e.g., 4-amino-5-(4-fluoroanilino)-pyrazolo [3,4-d] pyrimidine. The MNK inhibitor can be, e.g., a MNK1a, MNK1b, MNK2a and/or MNK2b inhibitor. In one embodiment, the kinase inhibitor is a dual PI3K/mTOR inhibitor described herein, such as, e.g., PF-04695102.

[1186] In one embodiment, the kinase inhibitor is a CDK4 inhibitor selected from aloisine A; flavopiridol or HMR-1275, 2-(2-chlorophenyl)-5,7-dihydroxy-8-[(3S,4R)-3-hydroxy-1-methyl-4-piperidinyl]-4-chromenone; crizotinib (PF-02341066; 2-(2-Chlorophenyl)-5,7-dihydroxy-8-[(2R,3S)-2-(hydroxymethyl)-1-methyl-3-pyrrolidinyl]-4H-1-benzopyran-4-one, hydrochloride (P276-00); 1-methyl-5-[[2-[5-(trifluoromethyl)-1H-imidazol-2-yl]-4-pyridinyl]oxy]-N-[4-(trifluoromethyl)phenyl]-1H-benzimidazol-2-amine (RAF265); indisulam (E7070); roscovitine (CYC202); palbociclib (PD0332991); dinaciclib (SCH727965); N-[5-[[(5-tert-butyloxazol-2-yl)methyl]thio]thiazol-2-yl]piperidine-4-carboxamide (BMS 387032); 4-[[9-chloro-7-(2,6-difluorophenyl)-5H-pyrimido[5,4-d][2]benzazepin-2-yl]amino]-benzoic acid (MLN8054); 5-[3-(4,6-difluoro-1H-benzimidazol-2-yl)-1H-indazol-5-yl]-N-ethyl-4-methyl-3-pyridinemethanamine (AG-024322); 4-(2,6-dichlorobenzoylamino)-1H-pyrazole-3-carboxylic acid N-(piperidin-4-yl)amide (AT7519); 4-[2-methyl-1-(1-methylethyl)-1H-imidazol-5-yl]-N-[4-(methylsulfonyl)phenyl]-2-pyrimidinamine (AZD5438); and XL281 (BMS908662).

[1187] In one embodiment, the kinase inhibitor is a CDK4 inhibitor, e.g., palbociclib (PD0332991), and the palbociclib is administered at a dose of about 50 mg, 60 mg, 70 mg, 75 mg, 80 mg, 90 mg, 100 mg, 105 mg, 110 mg, 115 mg, 120 mg, 125 mg, 130 mg, 135 mg (e.g., 75 mg, 100 mg or 125 mg) daily for a period of time, e.g., daily for 14-21 days of a 28 day cycle, or daily for 7-12 days of a 21 day cycle. In one embodiment, 1, 2, 3, 4, 5, 6, 7, 8, 9, 10, 11, 12 or more cycles of palbociclib are administered.

[1188] In embodiments, a CAR-expressing cell described herein is administered to a subject in combination with a cyclin-dependent kinase (CDK) 4 or 6 inhibitor, e.g., a CDK4 inhibitor or a CDK6 inhibitor described herein. In embodiments, a CAR-expressing cell described herein is administered to a subject in combination with a CDK4/6 inhibitor (e.g., an inhibitor that targets both CDK4 and CDK6), e.g., a CDK4/6 inhibitor described herein. In an embodiment, the subject has MCL. MCL is an aggressive cancer that is poorly responsive to currently available therapies, i.e., essentially incurable. In many cases of MCL, cyclin D1 (a regulator of CDK4/6) is expressed (e.g., due to chromosomal translocation involving immunoglobulin and Cyclin D1 genes) in MCL cells. Thus, without being bound by theory, it is thought that MCL cells are highly sensitive to CDK4/6 inhibition with high specificity (i.e., minimal effect on normal immune cells). CDK4/6 inhibitors alone have had some efficacy in treating MCL, but have only achieved partial remission with a high relapse rate. An exemplary CDK4/6 inhibitor is LEE011 (also called ribociclib), the structure of which is shown below.

[chemical structure]

[1189] Without being bound by theory, it is believed that administration of a CAR-expressing cell described herein with a CDK4/6 inhibitor (e.g., LEE011 or other CDK4/6 inhibitor described herein) can achieve higher responsiveness, e.g., with higher remission rates and/or lower relapse rates, e.g., compared to a CDK4/6 inhibitor alone.

[1190] In one embodiment, the kinase inhibitor is a BTK inhibitor selected from ibrutinib (PCI-32765); GDC-0834; RN-486; CGI-560; CGI-1764; HM-71224; CC-292; ONO-4059; CNX-774; and LFM-A13. In a preferred embodiment, the BTK inhibitor does not reduce or inhibit the kinase activity of interleukin-2-inducible kinase (ITK), and is selected from GDC-0834; RN-486; CGI-560; CGI-1764; HM-71224; CC-292; ONO-4059; CNX-774; and LFM-A13.

[1191] In one embodiment, the kinase inhibitor is a BTK inhibitor, e.g., ibrutinib (PCI-32765). In embodiments, a CAR-expressing cell described herein is administered to a subject in combination with a BTK inhibitor (e.g., ibrutinib). In embodiments, a CAR-expressing cell described herein is administered to a subject in combination with ibrutinib (also called PCI-32765). The structure of ibrutinib (1-[(3R)-3-[4-Amino-3-(4-phenoxyphenyl)-1H-pyrazolo[3,4-d]pyrimidin-1-yl]piperidin-1-yl]prop-2-en-1-one) is shown below.

[chemical structure]

[1192] In embodiments, the subject has CLL, mantle cell lymphoma (MCL), or small lymphocytic lymphoma (SLL). For example, the subject has a deletion in the short arm of chromosome 17 (del(17p), e.g., in a leukemic cell). In other examples, the subject does not have a del(17p). In embodiments, the subject has relapsed CLL or SLL, e.g., the subject has previously been administered a cancer therapy (e.g., previously been administered one, two, three, or four prior cancer therapies). In embodiments, the subject has refractory CLL or SLL. In other embodiments, the subject has follicular lymphoma, e.g., relapse or refractory follicular lymphoma. In some embodiments, ibrutinib is administered at a dosage of about 300-600 mg/day (e.g., about 300-350, 350-400, 400-450, 450-500, 500-550, or 550-600 mg/day, e.g., about 420 mg/day or about 560 mg/day), e.g., orally. In embodiments, the ibrutinib is administered at a dose of about 250 mg, 300 mg, 350 mg, 400 mg, 420 mg, 440 mg, 460 mg, 480 mg, 500 mg, 520 mg, 540 mg, 560 mg, 580 mg, 600 mg (e.g., 250 mg, 420 mg or 560 mg) daily for a period of time, e.g., daily for 21 day cycle, or daily for 28 day cycle. In one embodiment, 1, 2, 3, 4, 5, 6, 7, 8, 9, 10, 11, 12 or more cycles of ibrutinib are administered. Without being bound by theory, it is thought that the addition of ibrutinib enhances the T cell proliferative response and may shift T cells from a T-helper-2 (Th2) to T-helper-1 (Th1) phenotype. Th1 and Th2 are phenotypes of helper T cells, with Th1 versus Th2 directing different immune response pathways. A Th1 phenotype is associated with proinflammatory responses, e.g., for killing cells, such as intracellular pathogens/viruses or cancerous cells, or perpetuating autoimmune responses. A Th2 phenotype is associated with eosinophil accumulation and anti-inflammatory responses.

[1193] In one embodiment, the kinase inhibitor is an mTOR inhibitor selected from temsirolimus; ridaforolimus (1R,2R,4S)-4-[(2R)-2 [(1R,9S,12S,15R,16E,18R,19R,21R,23S,24E,26E,28Z,30S,32S,35R)-1,18-dihydroxy-19,30-dimethoxy-15,17,21,23, 29,35-hexamethyl-2,3,10,14,20-pentaoxo-11,36-dioxa-4-azatricyclo[30.3.1.0^{4,9}] hexatriaconta-16,24,26,28-tetraen-12-yl]propyl]-2-methoxycyclohexyl dimethylphosphinate, also known as AP23573 and MK8669; everolimus (RAD001); rapamycin (AY22989); simapimod; (5-{2,4-bis[(3S)-3-methylmorpholin-4-yl]pyrido[2,3-d]pyrimidin-7-yl}-2-methoxyphenyl)methanol (AZD8055); 2-amino-8-[trans-4-(2-hydroxyethoxy)cyclohexyl]-6-(6-methoxy-3-pyridinyl)-4-methyl-pyrido[2,3-d]pyrimidin-7(8H)-one (PF04691502); and N²-[1,4-dioxo-4-[[4-(4-oxo-8-phenyl-4H-1-benzopyran-2-yl)morpholinium-4-yl]methoxy]butyl]-L-arginylglycyl-L-α-aspartylL-serine- (SEQ ID NO: 112), inner salt (SF1126); and XL765.

[1194] In one embodiment, the kinase inhibitor is an mTOR inhibitor, e.g., rapamycin, and the rapamycin is administered at a dose of about 3 mg, 4 mg, 5 mg, 6 mg, 7 mg, 8 mg, 9 mg, 10 mg (e.g., 6 mg) daily for a period of time, e.g., daily for 21 day cycle, or daily for 28 day cycle. In one embodiment, 1, 2, 3, 4, 5, 6, 7, 8, 9, 10, 11, 12 or more cycles of rapamycin are administered. In one embodiment, the kinase inhibitor is an mTOR inhibitor, e.g., everolimus and the everolimus is administered at a dose of about 2 mg, 2.5 mg, 3 mg, 4 mg, 5 mg, 6 mg, 7 mg, 8 mg, 9 mg, 10 mg, 11 mg, 12 mg, 13 mg, 14 mg, 15 mg (e.g., 10 mg) daily for a period of time, e.g., daily for 28 day cycle. In one embodiment, 1, 2, 3, 4, 5, 6, 7, 8, 9, 10, 11, 12 or more cycles of everolimus are administered.

[1195] In one embodiment, the kinase inhibitor is an MNK inhibitor selected from CGP052088; 4-amino-3-(p-fluorophenylamino)-pyrazolo [3,4-d] pyrimidine (CGP57380); cercosporamide; ETC-1780445-2; and 4-amino-5-(4-fluoroanilino)-pyrazolo [3,4-d] pyrimidine.

[1196] In embodiments, a CAR-expressing cell described herein is administered to a subject in combination with a phosphoinositide 3-kinase (PI3K) inhibitor (e.g., a PI3K inhibitor described herein, e.g., idelalisib or duvelisib) and/or rituximab. In embodiments, a CAR-expressing cell described herein is administered to a subject in combination with idelalisib and rituximab. In embodiments, a CAR-expressing cell described herein is administered to a subject in combination with duvelisib and rituximab. Idelalisib (also called GS-1101 or CAL-101; Gilead) is a small molecule that blocks the delta isoform of PI3K. The structure of idelalisib (5-Fluoro-3-phenyl-2-[(1S)-1-(7H-purin-6-ylamino)propyl]-4(3H)-quinazolinone) is shown below.

[chemical structure]

[1197] Duvelisib (also called IPI-145; Infinity Pharmaceuticals and Abbvie) is a small molecule that blocks PI3K-δ,γ. The structure of duvelisib (8-Chloro-2-phenyl-3-[(1S)-1-(9H-purin-6-ylamino)ethyl]-1(2H)-isoquinolinone) is shown below.

[chemical structure]

[1198] In embodiments, the subject has CLL. In embodiments, the subject has relapsed CLL, e.g., the subject has previously been administered a cancer therapy (e.g., previously been administered an anti-CD20 antibody or previously been administered ibrutinib). For example, the subject has a deletion in the short arm of chromosome 17 (del(17p), e.g., in a leukemic cell). In other examples, the subject does not have a del(17p). In embodiments, the subject comprises a leukemic cell comprising a mutation in the immunoglobulin heavy-chain variable-region (IgV_{H}) gene. In other embodiments, the subject does not comprise a leukemic cell comprising a mutation in the immunoglobulin heavy-chain variable-region (IgV_{H}) gene. In embodiments, the subject has a deletion in the long arm of chromosome 11 (del(11q)). In other embodiments, the subject does not have a del(11q). In embodiments, idelalisib is administered at a dosage of about 100-400 mg (e.g., 100-125, 125-150, 150-175, 175-200, 200-225, 225-250, 250-275, 275-300, 325-350, 350-375, or 375-400 mg), e.g., BID. In embodiments, duvelisib is administered at a dosage of about 15-100 mg (e.g., about 15-25, 25-50, 50-75, or 75-100 mg), e.g., twice a day. In embodiments, rituximab is administered at a dosage of about 350-550 mg/m² (e.g., 350-375, 375-400, 400-425, 425-450, 450-475, or 475-500 mg/m²), e.g., intravenously.

[1199] In one embodiment, the kinase inhibitor is a dual phosphatidylinositol 3-kinase (PI3K) and mTOR inhibitor selected from 2-Amino-8-[trans-4-(2-hydroxyethoxy)cyclohexyl]-6-(6-methoxy-3-pyridinyl)-4-methyl-pyrido[2,3-d]pyrimidin-7(8H)-one (PF-04691502); N-[4-[[4-(Dimethylamino)-1-piperidinyl]carbonyl]phenyl]-N′-[4-(4,6-di-4-morpholinyl-1,3,5-triazin-2-yl)phenyl]urea (PF-05212384, PKI-587); 2-Methyl-2-{4-[3-methyl-2-oxo-8-(quinolin-3-yl)-2,3-dihydro-1H-imidazo[4,5-c]quinolin-1-yl]phenyl}propanenitrile (BEZ-235); apitolisib (GDC-0980, RG7422); 2,4-Difluoro-N-{2-(methyloxy)-5-[4-(4-pyridazinyl)-6-quinolinyl]-3-pyridinyl}benzenesulfonamide (GSK2126458); 8-(6-methoxypyridin-3-yl)-3-methyl-1-(4-(piperazin-1-yl)-3-(trifluoromethyl)phenyl)-1H-imidazo[4,5-c]quinolin-2(3H)-one Maleic acid (NVP-BGT226); 3-[4-(4-Morpholinylpyrido[3′,2′:4,5]furo[3,2-d]pyrimidin-2-yl]phenol (PI-103); 5-(9-isopropyl-8-methyl-2-morpholino-9H-purin-6-yl)pyrimidin-2-amine (VS-5584, SB2343); and N-[2-[(3,5-Dimethoxyphenyl)amino]quinoxalin-3-yl]-4-[(4-methyl-3-methoxyphenyl)carbonyl]aminophenylsulfonamide (XL765).

[1200] In embodiments, a CAR-expressing cell described herein is administered to a subject in combination with an anaplastic lymphoma kinase (ALK) inhibitor. Exemplary ALK kinases include but are not limited to crizotinib (Pfizer), ceritinib (Novartis), alectinib (Chugai), brigatinib (also called AP26113; Ariad), entrectinib (Ignyta), PF-06463922 (Pfizer), TSR-011 (Tesaro) (see, e.g., Clinical Trial Identifier No. NCT02048488), CEP-37440 (Teva), and X-396 (Xcovery). In some embodiments, the subject has a solid cancer, e.g., a solid cancer described herein, e.g., lung cancer.

[1201] The chemical name of crizotinib is 3-[(1R)-1-(2,6-dichloro-3-fluorophenyl)ethoxy]-5-(1-piperidin-4-ylpyrazol-4-yl)pyridin-2-amine. The chemical name of ceritinib is 5-Chloro-N²-[2-isopropoxy-5-methyl-4-(4-piperidinyl)phenyl]-N⁴-[2-(isopropylsulfonyl)phenyl]-2,4-pyrimidinediamine. The chemical name of alectinib is 9-ethyl-6,6-dimethyl-8-(4-morpholinopiperidin-1-yl)-11-oxo-6,11-dihydro-5H-benzo[b]carbazole-3-carbonitrile. The chemical name of brigatinib is 5-Chloro-N²-{4-[4-(dimethylamino)-1-piperidinyl]-2-methoxyphenyl}-N⁴-[2-(dimethylphosphoryl)phenyl]-2,4-pyrimidinediamine The chemical name of entrectinib is N-(5-(3,5-difluorobenzyl)-1H-indazol-3-yl)-4-(4-methylpiperazin-1-yl)-2-((tetrahydro-2H-pyran-4-yl)amino)benzamide. The chemical name of PF-06463922 is (10R)-7-Amino-12-fluoro-2,10,16-trimethyl-15-oxo-10,15,16,17-tetrahydro-2H-8,4-(metheno)pyrazolo[4,3-h][2,5,11]-benzoxadiazacyclotetradecine-3-carbonitrile. The chemical structure of CEP-37440 is (S)-2-((5-chloro-2-((6-(4-(2-hydroxyethyl)piperazin-1-yl)-1-methoxy-6,7,8,9-tetrahydro-5H-benzo[7]annulen-2-yl)amino)pyrimidin-4-yl)amino)-N-methylbenzamide. The chemical name of X-396 is (R)-6-amino-5-(1-(2,6-dichloro-3-fluorophenyl)ethoxy)-N-(4-(4-methylpiperazine-1-carbonyl)phenyl)pyridazine-3-carboxamide.

[1202] Drugs that inhibit either the calcium dependent phosphatase calcineurin (cyclosporine and FK506) or inhibit the p70S6 kinase that is important for growth factor induced signaling (rapamycin). (Liu et al., Cell 66:807-815, 1991; Henderson et al., Immun 73:316-321, 1991; Bierer et al., Curr. Opin. Immun 5:763-773, 1993) can also be used. In a further aspect, the cell compositions of the present invention may be administered to a patient in conjunction with (e.g., before, simultaneously or following) bone marrow transplantation, T cell ablative therapy using chemotherapy agents such as, fludarabine, external-beam radiation therapy (XRT), cyclophosphamide, and/or antibodies such as OKT3 or CAMPATH. In one aspect, the cell compositions of the present invention are administered following B-cell ablative therapy such as agents that react with CD20, e.g., Rituxan. For example, in one embodiment, subjects may undergo standard treatment with high dose chemotherapy followed by peripheral blood stem cell transplantation. In certain embodiments, following the transplant, subjects receive an infusion of the expanded immune cells of the present invention. In an additional embodiment, expanded cells are administered before or following surgery.

[1203] In embodiments, a CAR-expressing cell described herein is administered to a subject in combination with an indoleamine 2,3-dioxygenase (IDO) inhibitor. IDO is an enzyme that catalyzes the degradation of the amino acid, L-tryptophan, to kynurenine. Many cancers overexpress IDO, e.g., prostatic, colorectal, pancreatic, cervical, gastric, ovarian, head, and lung cancer. pDCs, macrophages, and dendritic cells (DCs) can express IDO. Without being bound by theory, it is thought that a decrease in L-tryptophan (e.g., catalyzed by IDO) results in an immunosuppressive milieu by inducing T-cell anergy and apoptosis. Thus, without being bound by theory, it is thought that an IDO inhibitor can enhance the efficacy of a CAR-expressing cell described herein, e.g., by decreasing the suppression or death of a CAR-expressing immune cell. In embodiments, the subject has a solid tumor, e.g., a solid tumor described herein, e.g., prostatic, colorectal, pancreatic, cervical, gastric, ovarian, head, or lung cancer. Exemplary inhibitors of IDO include but are not limited to 1-methyl-tryptophan, indoximod (NewLink Genetics) (see, e.g., Clinical Trial Identifier Nos. NCT01191216; NCT01792050), and INCB024360 (Incyte Corp.) (see, e.g., Clinical Trial Identifier Nos. NCT01604889; NCT01685255).

[1204] In embodiments, a CAR-expressing cell described herein is administered to a subject in combination with a modulator of myeloid-derived suppressor cells (MDSCs). MDSCs accumulate in the periphery and at the tumor site of many solid tumors. These cells suppress T cell responses, thereby hindering the efficacy of CAR-expressing cell therapy. Without being bound by theory, it is thought that administration of a MDSC modulator enhances the efficacy of a CAR-expressing cell described herein. In an embodiment, the subject has a solid tumor, e.g., a solid tumor described herein, e.g., glioblastoma. Exemplary modulators of MDSCs include but are not limited to MCS110 and BLZ945. MCS110 is a monoclonal antibody (mAb) against macrophage colony-stimulating factor (M-CSF). See, e.g., Clinical Trial Identifier No. NCT00757757. BLZ945 is a small molecule inhibitor of colony stimulating factor 1 receptor (CSF1R). See, e.g., Pyonteck et al. Nat. Med. 19(2013):1264-72. The structure of BLZ945 is shown below.

[chemical structure]

[1205] In embodiments, a CAR-expressing cell described herein is administered to a subject in combination with a CD19 CART cell (e.g., CTL019, e.g., as described in WO2012/079000, incorporated herein by reference). In embodiments, the subject has a CD19+ lymphoma, e.g., a CD19+ Non-Hodgkin's Lymphoma (NHL), a CD19+ FL, or a CD19+ DLBCL. In embodiments, the subject has a relapsed or refractory CD19+ lymphoma. In embodiments, a lymphodepleting chemotherapy is administered to the subject prior to, concurrently with, or after administration (e.g., infusion) of CD19 CART cells. In an example, the lymphodepleting chemotherapy is administered to the subject prior to administration of CD19 CART cells. For example, the lymphodepleting chemotherapy ends 1-4 days (e.g., 1, 2, 3, or 4 days) prior to CD19 CART cell infusion. In embodiments, multiple doses of CD19 CART cells are administered, e.g., as described herein. For example, a single dose comprises about 5×10⁸ CD19 CART cells. In embodiments, a lymphodepleting chemotherapy is administered to the subject prior to, concurrently with, or after administration (e.g., infusion) of a CAR-expressing cell described herein, e.g., a non-CD19 CAR-expressing cell. In embodiments, a CD19 CART is administered to the subject prior to, concurrently with, or after administration (e.g., infusion) of a non-CD19 CAR-expressing cell, e.g., a non-CD19 CAR-expressing cell described herein.

[1206] In some embodiments, a CAR-expressing cell described herein is administered to a subject in combination with a interleukin-15 (IL-15) polypeptide, a interleukin-15 receptor alpha (IL-15Ra) polypeptide, or a combination of both a IL-15 polypeptide and a IL-15Ra polypeptide e.g., hetIL-15 (Admune Therapeutics, LLC). hetIL-15 is a heterodimeric non-covalent complex of IL-15 and IL-15Ra. hetIL-15 is described in, e.g., U.S. Pat. No. 8,124,084, U.S. 2012/0177598, U.S. 2009/0082299, U.S. 2012/0141413, and U.S. 2011/0081311, incorporated herein by reference. In embodiments, het-IL-15 is administered subcutaneously. In embodiments, the subject has a cancer, e.g., solid cancer, e.g., melanoma or colon cancer. In embodiments, the subject has a metastatic cancer.

[1207] In one embodiment, the subject can be administered an agent which reduces or ameliorates a side effect associated with the administration of a CAR-expressing cell. Side effects associated with the administration of a CAR-expressing cell include, but are not limited to CRS, and hemophagocytic lymphohistiocytosis (HLH), also termed Macrophage Activation Syndrome (MAS). Symptoms of CRS include high fevers, nausea, transient hypotension, hypoxia, and the like. CRS may include clinical constitutional signs and symptoms such as fever, fatigue, anorexia, myalgias, arthalgias, nausea, vomiting, and headache. CRS may include clinical skin signs and symptoms such as rash. CRS may include clinical gastrointestinal signs and symptoms such as nausea, vomiting and diarrhea. CRS may include clinical respiratory signs and symptoms such as tachypnea and hypoxemia. CRS may include clinical cardiovascular signs and symptoms such as tachycardia, widened pulse pressure, hypotension, increased cardiac output (early) and potentially diminished cardiac output (late). CRS may include clinical coagulation signs and symptoms such as elevated d-dimer, hypofibrinogenemia with or without bleeding. CRS may include clinical renal signs and symptoms such as azotemia. CRS may include clinical hepatic signs and symptoms such as transaminitis and hyperbilirubinemia. CRS may include clinical neurologic signs and symptoms such as headache, mental status changes, confusion, delirium, word finding difficulty or frank aphasia, hallucinations, tremor, dymetria, altered gait, and seizures.

[1208] Accordingly, the methods described herein can comprise administering a CAR-expressing cell described herein to a subject and further administering one or more agents to manage elevated levels of a soluble factor resulting from treatment with a CAR-expressing cell. In one embodiment, the soluble factor elevated in the subject is one or more of IFN-γ, TNFα, IL-2 and IL-6. In an embodiment, the factor elevated in the subject is one or more of IL-1, GM-CSF, IL-10, IL-8, IL-5 and fraktalkine. Therefore, an agent administered to treat this side effect can be an agent that neutralizes one or more of these soluble factors. In one embodiment, the agent that neutralizes one or more of these soluble forms is an antibody or antigen binding fragment thereof. Examples of such agents include, but are not limited to a steroid (e.g., corticosteroid), an inhibitor of TNFα, and an inhibitor of IL-6. An example of a TNFα inhibitor is an anti-TNFα antibody molecule such as, infliximab, adalimumab, certolizumab pegol, and golimumab. Another example of a TNFα inhibitor is a fusion protein such as entanercept. Small molecule inhibitors of TNFα include, but are not limited to, xanthine derivatives (e.g. pentoxifylline) and bupropion. An example of an IL-6 inhibitor is an anti-IL-6 antibody molecule or an anti-IL-6 receptor antibody molecule such as tocilizumab (toc), sarilumab, elsilimomab, CNTO 328, ALD518/BMS-945429, CNTO 136, CPSI-2364, CDP6038, VX30, ARGX-109, FE301, and FM101. In one embodiment, the anti-IL-6 receptor antibody molecule is tocilizumab. An example of an IL-1R based inhibitor is anakinra

[1209] In one embodiment, the subject can be administered an agent which enhances the activity of a CAR-expressing cell. For example, in one embodiment, the agent can be an agent which inhibits an inhibitory molecule. Inhibitory molecules, e.g., Programmed Death 1 (PD-1), can, in some embodiments, decrease the ability of a CAR-expressing cell to mount an immune effector response. Examples of inhibitory molecules include PD-1, PD-L1, CTLA-4, TIM-3, CEACAM (e.g., CEACAM-1, CEACAM-3 and/or CEACAM-5), LAG-3, VISTA, BTLA, TIGIT, LAIR1, CD160, 2B4 and TGF beta. Inhibition of an inhibitory molecule, e.g., by inhibition at the DNA, RNA or protein level, can optimize a CAR-expressing cell performance In embodiments, an inhibitory nucleic acid, e.g., an inhibitory nucleic acid, e.g., a dsRNA, e.g., an siRNA or shRNA, a clustered regularly interspaced short palindromic repeats (CRISPR), a transcription-activator like effector nuclease (TALEN), or a zinc finger endonuclease (ZFN), e.g., as described herein, can be used to inhibit expression of an inhibitory molecule in the CAR-expressing cell. In an embodiment the inhibitor is an shRNA. In an embodiment, the inhibitory molecule is inhibited within a CAR-expressing cell. In these embodiments, a dsRNA molecule that inhibits expression of the inhibitory molecule is linked to the nucleic acid that encodes a component, e.g., all of the components, of the CAR. In one embodiment, the inhibitor of an inhibitory signal can be, e.g., an antibody or antibody fragment that binds to an inhibitory molecule. For example, the agent can be an antibody or antibody fragment that binds to PD-1, PD-L1, PD-L2 or CTLA4 (e.g., ipilimumab (also referred to as MDX-010 and MDX-101, and marketed as Yervoy®; Bristol-Myers Squibb; Tremelimumab (IgG2 monoclonal antibody available from Pfizer, formerly known as ticilimumab, CP-675,206).). In an embodiment, the agent is an antibody or antibody fragment that binds to TIM3. In an embodiment, the agent is an antibody or antibody fragment that binds to CEACAM (CEACAM-1, CEACAM-3, and/or CEACAM-5). In an embodiment, the agent is an antibody or antibody fragment that binds to LAG3.

[1210] PD-1 is an inhibitory member of the CD28 family of receptors that also includes CD28, CTLA-4, ICOS, and BTLA. PD-1 is expressed on activated B cells, T cells and myeloid cells (Agata et al. 1996 Int. Immunol 8:765-75). Two ligands for PD-1, PD-L1 and PD-L2 have been shown to downregulate T cell activation upon binding to PD-1 (Freeman et a. 2000 J Exp Med 192:1027-34; Latchman et al. 2001 Nat Immunol 2:261-8; Carter et al. 2002 Eur J Immunol 32:634-43). PD-L1 is abundant in human cancers (Dong et al. 2003 J Mol Med 81:281-7; Blank et al. 2005 Cancer Immunol. Immunother 54:307-314; Konishi et al. 2004 Clin Cancer Res 10:5094) Immune suppression can be reversed by inhibiting the local interaction of PD-1 with PD-L1. Antibodies, antibody fragments, and other inhibitors of PD-1, PD-L1 and PD-L2 are available in the art and may be used combination with a cars of the present invention described herein. For example, nivolumab (also referred to as BMS-936558 or MDX1106; Bristol-Myers Squibb) is a fully human IgG4 monoclonal antibody which specifically blocks PD-1. Nivolumab (clone 5C4) and other human monoclonal antibodies that specifically bind to PD-1 are disclosed in U.S. Pat. No. 8,008,449 and WO2006/121168. Pidilizumab (CT-011; Cure Tech) is a humanized IgG1k monoclonal antibody that binds to PD-1. Pidilizumab and other humanized anti-PD-1 monoclonal antibodies are disclosed in WO2009/101611. Pembrolizumab (formerly known as lambrolizumab, and also referred to as MK03475; Merck) is a humanized IgG4 monoclonal antibody that binds to PD-1. Pembrolizumab and other humanized anti-PD-1 antibodies are disclosed in U.S. Pat. No. 8,354,509 and WO2009/114335. MEDI4736 (Medimmune) is a human monoclonal antibody that binds to PDL1, and inhibits interaction of the ligand with PD1. MDPL3280A (Genentech/Roche) is a human Fc optimized IgG1 monoclonal antibody that binds to PD-L1. MDPL3280A and other human monoclonal antibodies to PD-L1 are disclosed in U.S. Pat. No. 7,943,743 and U.S. Publication No.: 20120039906. Other anti-PD-L1 binding agents include YW243.55.570 (heavy and light chain variable regions are shown in SEQ ID NOs 20 and 21 in WO2010/077634) and MDX-1 105 (also referred to as BMS-936559, and, e.g., anti-PD-L1 binding agents disclosed in WO2007/005874). AMP-224 (B7-DCIg; Amplimmune; e.g., disclosed in WO2010/027827 and WO2011/066342), is a PD-L2 Fc fusion soluble receptor that blocks the interaction between PD-1 and B7-H1. Other anti-PD-1 antibodies include AMP 514 (Amplimmune), among others, e.g., anti-PD-1 antibodies disclosed in U.S. Pat. No. 8,609,089, US 2010028330, and/or US 20120114649.

[1211] TIM-3 (T cell immunoglobulin-3) also negatively regulates T cell function, particularly in IFN-g-secreting CD4+ T helper 1 and CD8+ T cytotoxic 1 cells, and plays a critical role in T cell exhaustion. Inhibition of the interaction between TIM3 and its ligands, e.g., galectin-9 (Gal9), phosphotidylserine (PS), and HMGB1, can increase immune response. Antibodies, antibody fragments, and other inhibitors of TIM3 and its ligands are available in the art and may be used combination with a CD19 CAR described herein. For example, antibodies, antibody fragments, small molecules, or peptide inhibitors that target TIM3 binds to the IgV domain of TIM3 to inhibit interaction with its ligands. Antibodies and peptides that inhibit TIM3 are disclosed in WO2013/006490 and US20100247521. Other anti-TIM3 antibodies include humanized versions of RMT3-23 (disclosed in Ngiow et al., 2011, Cancer Res, 71:3540-3551), and clone 8B. 2C12 (disclosed in Monney et al., 2002, Nature, 415:536-541). Bi-specific antibodies that inhibit TIM3 and PD-1 are disclosed in US20130156774.

[1212] In other embodiments, the agent that enhances the activity of a CAR-expressing cell is a CEACAM inhibitor (e.g., CEACAM-1, CEACAM-3, and/or CEACAM-5 inhibitor). In one embodiment, the inhibitor of CEACAM is an anti-CEACAM antibody molecule. Exemplary anti-CEACAM-1 antibodies are described in WO 2010/125571, WO 2013/082366 WO 2014/059251 and WO 2014/022332, e.g., a monoclonal antibody 34B1, 26H7, and 5F4; or a recombinant form thereof, as described in, e.g., US 2004/0047858, U.S. Pat. No. 7,132,255 and WO 99/052552. In other embodiments, the anti-CEACAM antibody binds to CEACAM-5 as described in, e.g., Zheng et al. PLoS One. 2010 Sep. 2; 5(9). pii: e12529 (DOI:10:1371/journal.pone.0021146), or crossreacts with CEACAM-1 and CEACAM-5 as described in, e.g., WO 2013/054331 and US 2014/0271618.

[1213] Without wishing to be bound by theory, carcinoembryonic antigen cell adhesion molecules (CEACAM), such as CEACAM-1 and CEACAM-5, are believed to mediate, at least in part, inhibition of an anti-tumor immune response (see e.g., Markel et al. J Immunol. 2002 Mar. 15; 168(6):2803-10; Markel et al. J Immunol. 2006 Nov. 1; 177(9):6062-71; Markel et al. Immunology. 2009 February; 126(2):186-200; Markel et al. Cancer Immunol Immunother. 2010 February; 59(2):215-30; Ortenberg et al. Mol Cancer Ther. 2012 June; 11(6):1300-10; Stern et al. J Immunol. 2005 Jun. 1; 174(11):6692-701; Zheng et al. PLoS One. 2010 Sep. 2; 5(9). pii: e12529). For example, CEACAM-1 has been described as a heterophilic ligand for TIM-3 and as playing a role in TIM-3-mediated T cell tolerance and exhaustion (see e.g., WO 2014/022332; Huang, et al. (2014) Nature doi:10.1038/nature13848). In embodiments, co-blockade of CEACAM-1 and TIM-3 has been shown to enhance an anti-tumor immune response in xenograft colorectal cancer models (see e.g., WO 2014/022332; Huang, et al. (2014), supra). In other embodiments, co-blockade of CEACAM-1 and PD-1 reduce T cell tolerance as described, e.g., in WO 2014/059251. Thus, CEACAM inhibitors can be used with the other immunomodulators described herein (e.g., anti-PD-1 and/or anti-TIM-3 inhibitors) to enhance an immune response against a cancer, e.g., a melanoma, a lung cancer (e.g., NSCLC), a bladder cancer, a colon cancer an ovarian cancer, and other cancers as described herein.

[1214] LAG-3 (lymphocyte activation gene-3 or CD223) is a cell surface molecule expressed on activated T cells and B cells that has been shown to play a role in CD8+ T cell exhaustion. Antibodies, antibody fragments, and other inhibitors of LAG-3 and its ligands are available in the art and may be used combination with a CD19 CAR described herein. For example, BMS-986016 (Bristol-Myers Squib) is a monoclonal antibody that targets LAG3. IMP701 (Immutep) is an antagonist LAG-3 antibody and IMP731 (Immutep and GlaxoSmithKline) is a depleting LAG-3 antibody. Other LAG-3 inhibitors include IMP321 (Immutep), which is a recombinant fusion protein of a soluble portion of LAG3 and Ig that binds to MHC class II molecules and activates antigen presenting cells (APC). Other antibodies are disclosed, e.g., in WO2010/019570.

[1215] In some embodiments, the agent which enhances the activity of a CAR-expressing cell can be, e.g., a fusion protein comprising a first domain and a second domain, wherein the first domain is an inhibitory molecule, or fragment thereof, and the second domain is a polypeptide that is associated with a positive signal, e.g., a polypeptide comprising an intracellular signaling domain as described herein. In some embodiments, the polypeptide that is associated with a positive signal can include a costimulatory domain of CD28, CD27, ICOS, e.g., an intracellular signaling domain of CD28, CD27 and/or ICOS, and/or a primary signaling domain, e.g., of CD3 zeta, e.g., described herein. In one embodiment, the fusion protein is expressed by the same cell that expressed the CAR. In another embodiment, the fusion protein is expressed by a cell, e.g., a T cell that does not express a CAR of the present invention.

[1216] In one embodiment, the agent which enhances activity of a CAR-expressing cell described herein is miR-17-92.

[1217] In one embodiment, the agent which enhances activity of a CAR-described herein is a cytokine. Cytokines have important functions related to T cell expansion, differentiation, survival, and homeostasis. Cytokines that can be administered to the subject receiving a CAR-expressing cell described herein include: IL-2, IL-4, IL-7, IL-9, IL-15, IL-18, and IL-21, or a combination thereof. In preferred embodiments, the cytokine administered is IL-7, IL-15, or IL-21, or a combination thereof. The cytokine can be administered once a day or more than once a day, e.g., twice a day, three times a day, or four times a day. The cytokine can be administered for more than one day, e.g. the cytokine is administered for 2 days, 3 days, 4 days, 5 days, 6 days, 1 week, 2 weeks, 3 weeks, or 4 weeks. For example, the cytokine is administered once a day for 7 days.

[1218] In embodiments, the cytokine is administered in combination with CAR-expressing T cells. The cytokine can be administered simultaneously or concurrently with the CAR-expressing T cells, e.g., administered on the same day. The cytokine may be prepared in the same pharmaceutical composition as the CAR-expressing T cells, or may be prepared in a separate pharmaceutical composition. Alternatively, the cytokine can be administered shortly after administration of the CAR-expressing T cells, e.g., 1 day, 2 days, 3 days, 4 days, 5 days, 6 days, or 7 days after administration of the CAR-expressing T cells. In embodiments where the cytokine is administered in a dosing regimen that occurs over more than one day, the first day of the cytokine dosing regimen can be on the same day as administration with the CAR-expressing T cells, or the first day of the cytokine dosing regimen can be 1 day, 2 days, 3 days, 4 days, 5 days, 6 days, or 7 days after administration of the CAR-expressing T cells. In one embodiment, on the first day, the CAR-expressing T cells are administered to the subject, and on the second day, a cytokine is administered once a day for the next 7 days. In a preferred embodiment, the cytokine to be administered in combination with CAR-expressing T cells is IL-7, IL-15, or IL-21.

[1219] In other embodiments, the cytokine is administered a period of time after administration of CAR-expressing cells, e.g., at least 2 weeks, 3 weeks, 4 weeks, 6 weeks, 8 weeks, 10 weeks, 12 weeks, 4 months, 5 months, 6 months, 7 months, 8 months, 9 months, 10 months, 11 months, or 1 year or more after administration of CAR-expressing cells. In one embodiment, the cytokine is administered after assessment of the subject's response to the CAR-expressing cells. For example, the subject is administered CAR-expressing cells according to the dosage and regimens described herein. The response of the subject to CAR-expressing cell therapy is assessed at 2 weeks, 3 weeks, 4 weeks, 6 weeks, 8 weeks, 10 weeks, 12 weeks, 4 months, 5 months, 6 months, 7 months, 8 months, 9 months, 10 months, 11 months, or 1 year or more after administration of CAR-expressing cells, using any of the methods described herein, including inhibition of tumor growth, reduction of circulating tumor cells, or tumor regression. Subjects that do not exhibit a sufficient response to CAR-expressing cell therapy can be administered a cytokine. Administration of the cytokine to the subject that has sub-optimal response to the CAR-expressing cell therapy improves CAR-expressing cell efficacy or anti-cancer activity. In a preferred embodiment, the cytokine administered after administration of CAR-expressing cells is IL-7.

Combination with a Low Dose of an mTOR Inhibitor

[1220] In one embodiment, the cells expressing a CAR molecule, e.g., a CAR molecule described herein, are administered in combination with a low, immune enhancing dose of an mTOR inhibitor.

[1221] In an embodiment, a dose of an mTOR inhibitor is associated with, or provides, mTOR inhibition of at least 5 but no more than 90%, at least 10 but no more than 90%, at least 15, but no more than 90%, at least 20 but no more than 90%, at least 30 but no more than 90%, at least 40 but no more than 90%, at least 50 but no more than 90%, at least 60 but no more than 90%, or at least 70 but no more than 90%.

[1222] In an embodiment, a dose of an mTOR inhibitor is associated with, or provides, mTOR inhibition of at least 5 but no more than 80%, at least 10 but no more than 80%, at least 15, but no more than 80%, at least 20 but no more than 80%, at least 30 but no more than 80%, at least 40 but no more than 80%, at least 50 but no more than 80%, or at least 60 but no more than 80%.

[1223] In an embodiment, a dose of an mTOR inhibitor is associated with, or provides, mTOR inhibition of at least 5 but no more than 70%, at least 10 but no more than 70%, at least 15, but no more than 70%, at least 20 but no more than 70%, at least 30 but no more than 70%, at least 40 but no more than 70%, or at least 50 but no more than 70%.

[1224] In an embodiment, a dose of an mTOR inhibitor is associated with, or provides, mTOR inhibition of at least 5 but no more than 60%, at least 10 but no more than 60%, at least 15, but no more than 60%, at least 20 but no more than 60%, at least 30 but no more than 60%, or at least 40 but no more than 60%.

[1225] In an embodiment, a dose of an mTOR inhibitor is associated with, or provides, mTOR inhibition of at least 5 but no more than 50%, at least 10 but no more than 50%, at least 15, but no more than 50%, at least 20 but no more than 50%, at least 30 but no more than 50%, or at least 40 but no more than 50%.

[1226] In an embodiment, a dose of an mTOR inhibitor is associated with, or provides, mTOR inhibition of at least 5 but no more than 40%, at least 10 but no more than 40%, at least 15, but no more than 40%, at least 20 but no more than 40%, at least 30 but no more than 40%, or at least 35 but no more than 40%.

[1227] In an embodiment, a dose of an mTOR inhibitor is associated with, or provides, mTOR inhibition of at least 5 but no more than 30%, at least 10 but no more than 30%, at least 15, but no more than 30%, at least 20 but no more than 30%, or at least 25 but no more than 30%.

[1228] In an embodiment, a dose of an mTOR inhibitor is associated with, or provides, mTOR inhibition of at least 1, 2, 3, 4 or 5 but no more than 20%, at least 1, 2, 3, 4 or 5 but no more than 30%, at least 1, 2, 3, 4 or 5, but no more than 35, at least 1, 2, 3, 4 or 5 but no more than 40%, or at least 1, 2, 3, 4 or 5 but no more than 45%.

[1229] In an embodiment, a dose of an mTOR inhibitor is associated with, or provides, mTOR inhibition of at least 1, 2, 3, 4 or 5 but no more than 90%.

[1230] As is discussed herein, the extent of mTOR inhibition can be expressed as the extent of P70 S6 kinase inhibition, e.g., the extent of mTOR inhibition can be determined by the level of decrease in P70 S6 kinase activity, e.g., by the decrease in phosphorylation of a P70 S6 kinase substrate. The level of mTOR inhibition can be evaluated by a method described herein, e.g. by the Boulay assay, or measurement of phosphorylated S6 levels by western blot.

Exemplary mTOR Inhibitors

[1231] As used herein, the term “mTOR inhibitor” refers to a compound or ligand, or a pharmaceutically acceptable salt thereof, which inhibits the mTOR kinase in a cell. In an embodiment an mTOR inhibitor is an allosteric inhibitor. In an embodiment an mTOR inhibitor is a catalytic inhibitor.

[1232] Allosteric mTOR inhibitors include the neutral tricyclic compound rapamycin (sirolimus), rapamycin-related compounds, that is compounds having structural and functional similarity to rapamycin including, e.g., rapamycin derivatives, rapamycin analogs (also referred to as rapalogs) and other macrolide compounds that inhibit mTOR activity.

[1233] Rapamycin is a known macrolide antibiotic produced by Streptomyces hygroscopicus having the structure shown in Formula A.

[chemical structure]

[1234] See, e.g., McAlpine, J. B., et al., J. Antibiotics (1991) 44: 688; Schreiber, S. L., et al., J. Am. Chem. Soc. (1991) 113: 7433; U.S. Pat. No. 3,929,992. There are various numbering schemes proposed for rapamycin. To avoid confusion, when specific rapamycin analogs are named herein, the names are given with reference to rapamycin using the numbering scheme of formula A.

[1235] Rapamycin analogs useful in the invention are, for example, 0-substituted analogs in which the hydroxyl group on the cyclohexyl ring of rapamycin is replaced by OR₁ in which R₁ is hydroxyalkyl, hydroxyalkoxyalkyl, acylaminoalkyl, or aminoalkyl; e.g. RAD001, also known as, everolimus as described in U.S. Pat. No. 5,665,772 and WO94/09010 the contents of which are incorporated by reference. Other suitable rapamycin analogs include those substituted at the 26- or 28-position. The rapamycin analog may be an epimer of an analog mentioned above, particularly an epimer of an analog substituted in position 40, 28 or 26, and may optionally be further hydrogenated, e.g. as described in U.S. Pat. No. 6,015,815, WO95/14023 and WO99/15530 the contents of which are incorporated by reference, e.g. ABT578 also known as zotarolimus or a rapamycin analog described in U.S. Pat. No. 7,091,213, WO98/02441 and WO01/14387 the contents of which are incorporated by reference, e.g. AP23573 also known as ridaforolimus.

[1236] Examples of rapamycin analogs suitable for use in the present invention from U.S. Pat. No. 5,665,772 include, but are not limited to, 40-O-benzyl-rapamycin, 40-O-(4′-hydroxymethyl)benzyl-rapamycin, 40-O-[4′-(1,2-dihydroxyethyl)]benzyl-rapamycin, 40-O-allyl-rapamycin, 40-O-[3′-(2,2-dimethyl-1,3-dioxolan-4(S)-yl)-prop-2′-en-1′-yl]-rapamycin, (2′E,4′S)-40-O-(4′,5′-dihydroxypent-2′-en-1′-yl)-rapamycin, 40-O-(2-hydroxy)ethoxycarbonylmethyl-rapamycin, 40-O-(2-hydroxy)ethyl-rapamycin, 40-O-(3-hydroxy)propyl-rapamycin, 40-O-(6-hydroxy)hexyl-rapamycin, 40-O-[2-(2-hydroxy)ethoxy]ethyl-rapamycin, 40-O-[(3S)-2,2-dimethyldioxolan-3-yl]methyl-rapamycin, 40-O-[(2S)-2,3-dihydroxyprop-1-yl]-rapamycin, 40-O-(2-acetoxy)ethyl-rapamycin, 40-O-(2-nicotinoyloxy)ethyl-rapamycin, 40-O-[2-(N-morpholino)acetoxy]ethyl-rapamycin, 40-O-(2-N-imidazolylacetoxy)ethyl-rapamycin, 40-O-[2-(N-methyl-N′-piperazinyl)acetoxy]ethyl-rapamycin, 39-O-desmethyl-39,40-O,O-ethylene-rapamycin, (26R)-26-dihydro-40-O-(2-hydroxy)ethyl-rapamycin, 40-O-(2-aminoethyl)-rapamycin, 40-O-(2-acetaminoethyl)-rapamycin, 40-O-(2-nicotinamidoethyl)-rapamycin, 40-O-(2-(N-methyl-imidazo-2′-ylcarbethoxamido)ethyl)-rapamycin, 40-O-(2-ethoxycarbonylaminoethyl)-rapamycin, 40-O-(2-tolylsulfonamidoethyl)-rapamycin and 40-O-[2-(4′,5′-dicarboethoxy-1′,2′,3′-triazol-1′-yl)-ethyl]-rapamycin.

[1237] Other rapamycin analogs useful in the present invention are analogs where the hydroxyl group on the cyclohexyl ring of rapamycin and/or the hydroxy group at the 28 position is replaced with an hydroxyester group are known, for example, rapamycin analogs found in U.S. Pat. No. RE44,768, e.g. temsirolimus.

[1238] Other rapamycin analogs useful in the preset invention include those wherein the methoxy group at the 16 position is replaced with another substituent, preferably (optionally hydroxy-substituted) alkynyloxy, benzyl, orthomethoxybenzyl or chlorobenzyl and/or wherein the mexthoxy group at the 39 position is deleted together with the 39 carbon so that the cyclohexyl ring of rapamycin becomes a cyclopentyl ring lacking the 39 position methyoxy group; e.g. as described in WO95/16691 and WO96/41807 the contents of which are incorporated by reference. The analogs can be further modified such that the hydroxy at the 40-position of rapamycin is alkylated and/or the 32-carbonyl is reduced.

[1239] Rapamycin analogs from WO95/16691 include, but are not limited to, 16-demthoxy-16-(pent-2-ynyl)oxy-rapamycin, 16-demthoxy-16-(but-2-ynyl)oxy-rapamycin, 16-demthoxy-16-(propargyl)oxy-rapamycin, 16-demethoxy-16-(4-hydroxy-but-2-ynyl)oxy-rapamycin, 16-demthoxy-16-benzyloxy-40-O-(2-hydroxyethyl)-rapamycin, 16-demthoxy-16-benzyloxy-rapamycin, 16-demethoxy-16-ortho-methoxybenzyl-rapamycin, 16-demethoxy-40-O-(2-methoxyethyl)-16-pent-2-ynyl)oxy-rapamycin, 39-demethoxy-40-desoxy-39-formyl-42-nor-rapamycin, 39-demethoxy-40-desoxy-39-hydroxymethyl-42-nor-rapamycin, 39-demethoxy-40-desoxy-39-carboxy-42-nor-rapamycin, 39-demethoxy-40-desoxy-39-(4-methyl-piperazin-1-yl)carbonyl-42-nor-rapamycin, 39-demethoxy-40-desoxy-39-(morpholin-4-yl)carbonyl-42-nor-rapamycin, 39-demethoxy-40-desoxy-39-[N-methyl, N-(2-pyridin-2-yl-ethyl)]carbamoyl-42-nor-rapamycin and 39-demethoxy-40-desoxy-39-(p-toluenesulfonylhydrazonomethyl)-42-nor-rapamycin.

[1240] Rapamycin analogs from WO96/41807 include, but are not limited to, 32-deoxo-rapamycin, 16-O-pent-2-ynyl-32-deoxo-rapamycin, 16-O-pent-2-ynyl-32-deoxo-40-O-(2-hydroxy-ethyl)-rapamycin, 16-O-pent-2-ynyl-32-(S)-dihydro-40-O-(2-hydroxyethyl)-rapamycin, 32(S)-dihydro-40-O-(2-methoxy)ethyl-rapamycin and 32(S)-dihydro-40-O-(2-hydroxyethyl)-rapamycin.

[1241] Another suitable rapamycin analog is umirolimus as described in US2005/0101624 the contents of which are incorporated by reference.

[1242] RAD001, otherwise known as everolimus (Afinitor®), has the chemical name (1R,9S,12S,15R,16E,18R,19R,21R,23S,24E,26E,28E,30S,32S,35R)-1,18-dihydroxy-12-{(1R)-2-[(1S,3R,4R)-4-(2-hydroxyethoxy)-3-methoxycyclohexyl]-1-methylethyl}-19,30-dimethoxy-15,17,21,23,29,35-hexamethyl-11,36-dioxa-4-aza-tricyclo[30.3.1.04,9]hexatriaconta-16,24,26,28-tetraene-2,3,10,14,20-pentaone

[1243] Further examples of allosteric mTOR inhibitors include sirolimus (rapamycin, AY-22989), 40-[3-hydroxy-2-(hydroxymethyl)-2-methylpropanoate]-rapamycin (also called temsirolimus or CCI-779) and ridaforolimus (AP-23573/MK-8669). Other examples of allosteric mTor inhibitors include zotarolimus (ABT578) and umirolimus.

[1244] Alternatively or additionally, catalytic, ATP-competitive mTOR inhibitors have been found to target the mTOR kinase domain directly and target both mTORC1 and mTORC2. These are also more effective inhibitors of mTORC1 than such allosteric mTOR inhibitors as rapamycin, because they modulate rapamycin-resistant mTORC1 outputs such as 4EBP1-T37/46 phosphorylation and cap-dependent translation.

[1245] Catalytic inhibitors include: BEZ235 or 2-methyl-2-[4-(3-methyl-2-oxo-8-quinolin-3-yl-2,3-dihydro-imidazo[4,5-c]quinolin-1-yl)-phenyl]-propionitrile, or the monotosylate salt form. the synthesis of BEZ235 is described in WO2006/122806; CCG168 (otherwise known as AZD-8055, Chresta, C. M., et al., Cancer Res, 2010, 70(1), 288-298) which has the chemical name {5-[2,4-bis-((S)-3-methyl-morpholin-4-yl)-pyrido[2,3d]pyrimidin-7-yl]-2-methoxy-phenyl}-methanol; 3-[2,4-bis[(3 S)-3-methylmorpholin-4-yl]pyrido[2,3-d]pyrimidin-7-yl]-N-methylbenzamide (WO09104019); 3-(2-aminobenzo[d]oxazol-5-yl)-1-isopropyl-1H-pyrazolo[3,4-d]pyrimidin-4-amine (WO10051043 and WO2013023184); A N-(3-(N-(3-((3,5-dimethoxyphenyl)amino)quinoxaline-2-yl)sulfamoyl)phenyl)-3-methoxy-4-methylbenzamide (WO07044729 and WO12006552); PKI-587 (Venkatesan, A. M., J. Med. Chem., 2010, 53, 2636-2645) which has the chemical name 1-[4-[4-(dimethylamino)piperidine-1-carbonyl]phenyl]-3-[4-(4,6-dimorpholino-1,3,5-triazin-2-yl)phenyl]urea; GSK-2126458 (ACS Med. Chem. Lett., 2010, 1, 39-43) which has the chemical name 2,4-difluoro-N-{2-methoxy-5-[4-(4-pyridazinyl)-6-quinolinyl]-3-pyridinyl}benzenesulfonamide; 5-(9-isopropyl-8-methyl-2-morpholino-9H-purin-6-yl)pyrimidin-2-amine (WO10114484); (E)-N-(8-(6-amino-5-(trifluoromethyl)pyridin-3-yl)-1-(6-(2-cyanopropan-2-yl)pyridin-3-yl)-3-methyl-1H-imidazo[4,5-c]quinolin-2(3H)-ylidene)cyanamide (WO12007926).

[1246] Further examples of catalytic mTOR inhibitors include 8-(6-methoxy-pyridin-3-yl)-3-methyl-1-(4-piperazin-1-yl-3-trifluoromethyl-phenyl)-1,3-dihydro-imidazo[4,5-c]quinolin-2-one (WO2006/122806) and Ku-0063794 (Garcia-Martinez J M, et al., Biochem J., 2009, 421(1), 29-42. Ku-0063794 is a specific inhibitor of the mammalian target of rapamycin (mTOR).) WYE-354 is another example of a catalytic mTor inhibitor (Yu K, et al. (2009). Biochemical, Cellular, and In vivo Activity of Novel ATP-Competitive and Selective Inhibitors of the Mammalian Target of Rapamycin. Cancer Res. 69(15): 6232-6240).

[1247] mTOR inhibitors useful according to the present invention also include prodrugs, derivatives, pharmaceutically acceptable salts, or analogs thereof of any of the foregoing.

[1248] mTOR inhibitors, such as RAD001, may be formulated for delivery based on well-established methods in the art based on the particular dosages described herein. In particular, U.S. Pat. No. 6,004,973 (incorporated herein by reference) provides examples of formulations usable with the mTOR inhibitors described herein.

Evaluation of mTOR Inhibition

[1249] mTOR phosphorylates the kinase P70 S6, thereby activating P70 S6 kinase and allowing it to phosphorylate its substrate. The extent of mTOR inhibition can be expressed as the extent of P70 S6 kinase inhibition, e.g., the extent of mTOR inhibition can be determined by the level of decrease in P70 S6 kinase activity, e.g., by the decrease in phosphorylation of a P70 S6 kinase substrate. One can determine the level of mTOR inhibition, by measuring P70 S6 kinase activity (the ability of P70 S6 kinase to phosphorylate a substrate), in the absence of inhibitor, e.g., prior to administration of inhibitor, and in the presences of inhibitor, or after the administration of inhibitor. The level of inhibition of P70 S6 kinase gives the level of mTOR inhibition. Thus, if P70 S6 kinase is inhibited by 40%, mTOR activity, as measured by P70 S6 kinase activity, is inhibited by 40%. The extent or level of inhibition referred to herein is the average level of inhibition over the dosage interval. By way of example, if the inhibitor is given once per week, the level of inhibition is given by the average level of inhibition over that interval, namely a week.

[1250] Boulay et al., Cancer Res, 2004, 64:252-61, hereby incorporated by reference, teaches an assay that can be used to assess the level of mTOR inhibition (referred to herein as the Boulay assay). In an embodiment, the assay relies on the measurement of P70 S6 kinase activity from biological samples before and after administration of an mTOR inhibitor, e.g., RAD001. Samples can be taken at preselected times after treatment with an mTOR inhibitor, e.g., 24, 48, and 72 hours after treatment. Biological samples, e.g., from skin or peripheral blood mononuclear cells (PBMCs) can be used. Total protein extracts are prepared from the samples. P70 S6 kinase is isolated from the protein extracts by immunoprecipitation using an antibody that specifically recognizes the P70 S6 kinase. Activity of the isolated P70 S6 kinase can be measured in an in vitro kinase assay. The isolated kinase can be incubated with 40S ribosomal subunit substrates (which is an endogenous substrate of P70 S6 kinase) and gamma-³²P under conditions that allow phosphorylation of the substrate. Then the reaction mixture can be resolved on an SDS-PAGE gel, and ³²P signal analyzed using a PhosphorImager. A ³²P signal corresponding to the size of the 40S ribosomal subunit indicates phosphorylated substrate and the activity of P70 S6 kinase. Increases and decreases in kinase activity can be calculated by quantifying the area and intensity of the ³²P signal of the phosphorylated substrate (e.g., using ImageQuant, Molecular Dynamics), assigning arbitrary unit values to the quantified signal, and comparing the values from after administration with values from before administration or with a reference value. For example, percent inhibition of kinase activity can be calculated with the following formula: 1−(value obtained after administration/value obtained before administration)×100. As described above, the extent or level of inhibition referred to herein is the average level of inhibition over the dosage interval.

[1251] Methods for the evaluation of kinase activity, e.g., P70 S6 kinase activity, are also provided in U.S. Pat. No. 7,727,950, hereby incorporated by reference.

[1252] The level of mTOR inhibition can also be evaluated by a change in the ration of PD1 negative to PD1 positive T cells. T cells from peripheral blood can be identified as PD1 negative or positive by art-known methods.

Low-Dose mTOR Inhibitors

[1253] Methods described herein use low, immune enhancing, dose mTOR inhibitors, doses of mTOR inhibitors, e.g., allosteric mTOR inhibitors, including rapalogs such as RAD001. In contrast, levels of inhibitor that fully or near fully inhibit the mTOR pathway are immunosuppressive and are used, e.g., to prevent organ transplant rejection. In addition, high doses of rapalogs that fully inhibit mTOR also inhibit tumor cell growth and are used to treat a variety of cancers (See, e.g., Antineoplastic effects of mammalian target of rapamycine inhibitors. Salvadori M. World J Transplant. 2012 Oct. 24; 2(5):74-83; Current and Future Treatment Strategies for Patients with Advanced Hepatocellular Carcinoma: Role of mTOR Inhibition. Finn R S. Liver Cancer. 2012 November; 1(3-4):247-256; Emerging Signaling Pathways in Hepatocellular Carcinoma. Moeini A, Cornellà H, Villanueva A. Liver Cancer. 2012 September; 1(2):83-93; Targeted cancer therapy—Are the days of systemic chemotherapy numbered? Joo W D, Visintin I, Mor G. Maturitas. 2013 Sep. 20; Role of natural and adaptive immunity in renal cell carcinoma response to VEGFR-TKIs and mTOR inhibitor. Santoni M, Berardi R, Amantini C, Burattini L, Santini D, Santoni G, Cascinu S. Int J Cancer. 2013 Oct. 2).

[1254] The present invention is based, at least in part, on the surprising finding that doses of mTOR inhibitors well below those used in current clinical settings had a superior effect in increasing an immune response in a subject and increasing the ratio of PD-1 negative T cells/PD-1 positive T cells. It was surprising that low doses of mTOR inhibitors, producing only partial inhibition of mTOR activity, were able to effectively improve immune responses in human subjects and increase the ratio of PD-1 negative T cells/PD-1 positive T cells.

[1255] Alternatively, or in addition, without wishing to be bound by any theory, it is believed that low, a low, immune enhancing, dose of an mTOR inhibitor can increase naive T cell numbers, e.g., at least transiently, e.g., as compared to a non-treated subject. Alternatively or additionally, again while not wishing to be bound by theory, it is believed that treatment with an mTOR inhibitor after a sufficient amount of time or sufficient dosing results in one or more of the following:

[1256] an increase in the expression of one or more of the following markers: CD62L^{high}, CD127^{high}, CD27⁺, and BCL2, e.g., on memory T cells, e.g., memory T cell precursors;

[1257] a decrease in the expression of KLRG1, e.g., on memory T cells, e.g., memory T cell precursors; and

[1258] an increase in the number of memory T cell precursors, e.g., cells with any one or combination of the following characteristics: increased CD62L^{high} increased CD127^{high}, increased CD27⁺, decreased KLRG1, and increased BCL2;

[1259] and wherein any of the changes described above occurs, e.g., at least transiently, e.g., as compared to a non-treated subject (Araki, K et al. (2009) Nature 460:108-112). Memory T cell precursors are memory T cells that are early in the differentiation program. For example, memory T cells have one or more of the following characteristics: increased CD62L^{high}, increased CD127^{high} increased CD27⁺, decreased KLRG1, and/or increased BCL2.

[1260] In an embodiment, the invention relates to a composition, or dosage form, of an mTOR inhibitor, e.g., an allosteric mTOR inhibitor, e.g., a rapalog, rapamycin, or RAD001, or a catalytic mTOR inhibitor, which, when administered on a selected dosing regimen, e.g., once daily or once weekly, is associated with: a level of mTOR inhibition that is not associated with complete, or significant immune suppression, but is associated with enhancement of the immune response.

[1261] An mTOR inhibitor, e.g., an allosteric mTOR inhibitor, e.g., a rapalog, rapamycin, or RAD001, or a catalytic mTOR inhibitor, can be provided in a sustained release formulation. Any of the compositions or unit dosage forms described herein can be provided in a sustained release formulation. In some embodiments, a sustained release formulation will have lower bioavailability than an immediate release formulation. E.g., in embodiments, to attain a similar therapeutic effect of an immediate release formulation a sustained release formulation will have from about 2 to about 5, about 2.5 to about 3.5, or about 3 times the amount of inhibitor provided in the immediate release formulation.

[1262] In an embodiment, immediate release forms, e.g., of RAD001, typically used for one administration per week, having 0.1 to 20, 0.5 to 10, 2.5 to 7.5, 3 to 6, or about 5, mgs per unit dosage form, are provided. For once per week administrations, these immediate release formulations correspond to sustained release forms, having, respectively, 0.3 to 60, 1.5 to 30, 7.5 to 22.5, 9 to 18, or about 15 mgs of an mTOR inhibitor, e.g., an allosteric mTOR inhibitor, e.g., rapamycin or RAD001. In embodiments both forms are administered on a once/week basis.

[1263] In an embodiment, immediate release forms, e.g., of RAD001, typically used for one administration per day, having 0.005 to 1.5, 0.01 to 1.5, 0.1 to 1.5, 0.2 to 1.5, 0.3 to 1.5, 0.4 to 1.5, 0.5 to 1.5, 0.6 to 1.5, 0.7 to 1.5, 0.8 to 1.5, 1.0 to 1.5, 0.3 to 0.6, or about 0.5 mgs per unit dosage form, are provided. For once per day administrations, these immediate release forms correspond to sustained release forms, having, respectively, 0.015 to 4.5, 0.03 to 4.5, 0.3 to 4.5, 0.6 to 4.5, 0.9 to 4.5, 1.2 to 4.5, 1.5 to 4.5, 1.8 to 4.5, 2.1 to 4.5, 2.4 to 4.5, 3.0 to 4.5, 0.9 to 1.8, or about 1.5 mgs of an mTOR inhibitor, e.g., an allosteric mTOR inhibitor, e.g., rapamycin or RAD001. For once per week administrations, these immediate release forms correspond to sustained release forms, having, respectively, 0.1 to 30, 0.2 to 30, 2 to 30, 4 to 30, 6 to 30, 8 to 30, 10 to 30, 1.2 to 30, 14 to 30, 16 to 30, 20 to 30, 6 to 12, or about 10 mgs of an mTOR inhibitor, e.g., an allosteric mTOR inhibitor, e.g., rapamycin or RAD001.

[1264] In an embodiment, immediate release forms, e.g., of RAD001, typically used for one administration per day, having 0.01 to 1.0 mgs per unit dosage form, are provided. For once per day administrations, these immediate release forms correspond to sustained release forms, having, respectively, 0.03 to 3 mgs of an mTOR inhibitor, e.g., an allosteric mTOR inhibitor, e.g., rapamycin or RAD001.For once per week administrations, these immediate release forms correspond to sustained release forms, having, respectively, 0.2 to 20 mgs of an mTOR inhibitor, e.g., an allosteric mTOR inhibitor, e.g., rapamycin or RAD001.

[1265] In an embodiment, immediate release forms, e.g., of RAD001, typically used for one administration per week, having 0.5 to 5.0 mgs per unit dosage form, are provided. For once per week administrations, these immediate release forms correspond to sustained release forms, having, respectively, 1.5 to 15 mgs of an mTOR inhibitor, e.g., an allosteric mTOR inhibitor, e.g., rapamycin or RAD001.

[1266] As described above, one target of the mTOR pathway is the P70 S6 kinase. Thus, doses of mTOR inhibitors which are useful in the methods and compositions described herein are those which are sufficient to achieve no greater than 80% inhibition of P70 S6 kinase activity relative to the activity of the P70 S6 kinase in the absence of an mTOR inhibitor, e.g., as measured by an assay described herein, e.g., the Boulay assay. In a further aspect, the invention provides an amount of an mTOR inhibitor sufficient to achieve no greater than 38% inhibition of P70 S6 kinase activity relative to P70 S6 kinase activity in the absence of an mTOR inhibitor.

[1267] In one aspect the dose of mTOR inhibitor useful in the methods and compositions of the invention is sufficient to achieve, e.g., when administered to a human subject, 90 +/−5% (i.e., 85-95%), 89+/−5%, 88+/−5%, 87+/−5%, 86+/−5%, 85+/−5%, 84+/−5%, 83+/−5%, 82+/−5%, 81+/−5%, 80+/−5%, 79+/−5%, 78+/−5%, 77+/−5%, 76+/−5%, 75+/−5%, 74+/−5%, 73+/−5%, 72 +/−5%, 71 +/−5%, 70 +/−5%, 69 +/−5%, 68 +/−5%, 67 +/−5%, 66 +/−5%, 65+/−5%, 64 +/−5%, 63 +/−5%, 62 +/−5%, 61 +/−5%, 60 +/−5%, 59 +/−5%, 58 +/−5%, 57 +/−5%, 56 +/−5%, 55 +/−5%, 54 +/−5%, 54 +/−5%, 53 +/−5%, 52 +/−5%, 51 +/−5%, 50 +/−5%, 49+/−5%, 48 +/−5%, 47 +/−5%, 46 +/−5%, 45 +/−5%, 44 +/−5%, 43 +/−5%, 42 +/−5%, 41 +/−5%, 40+/−5%, 39 +/−5%, 38 +/−5%, 37 +/−5%, 36 +/−5%, 35 +/−5%, 34 +/−5%, 33 +/−5%, 32 +/−5%, 31 +/−5%, 30 +/−5%, 29 +/−5%, 28 +/−5%, 27 +/−5%, 26 +/−5%, 25 +/−5%, 24 +/−5%, 23+/−5%, 22 +/−5%, 21 +/−5%, 20 +/−5%, 19 +/−5%, 18 +/−5%, 17 +/−5%, 16 +/−5%, 15 +/−5%, 14+/−5%, 13 +/−5%, 12 +/−5%, 11 +/−5%, or 10 +/−5%, inhibition of P70 S6 kinase activity, e.g., as measured by an assay described herein, e.g., the Boulay assay.

[1268] P70 S6 kinase activity in a subject may be measured using methods known in the art, such as, for example, according to the methods described in U.S. Pat. No. 7,727,950, by immunoblot analysis of phosphoP70 S6K levels and/or phosphoP70 S6 levels or by in vitro kinase activity assays.

[1269] As used herein, the term “about” in reference to a dose of mTOR inhibitor refers to up to a +/−10% variability in the amount of mTOR inhibitor, but can include no variability around the stated dose.

[1270] In some embodiments, the invention provides methods comprising administering to a subject an mTOR inhibitor, e.g., an allosteric inhibitor, e.g., RAD001, at a dosage within a target trough level. In some embodiments, the trough level is significantly lower than trough levels associated with dosing regimens used in organ transplant and cancer patients. In an embodiment mTOR inhibitor, e.g., RAD001, or rapamycin, is administered to result in a trough level that is less than ½, ¼, 1/10, or 1/20 of the trough level that results in immunosuppression or an anticancer effect. In an embodiment mTOR inhibitor, e.g., RAD001, or rapamycin, is administered to result in a trough level that is less than ½, ¼, 1/10, or 1/20 of the trough level provided on the FDA approved packaging insert for use in immunosuppression or an anticancer indications.

[1271] In an embodiment a method disclosed herein comprises administering to a subject an mTOR inhibitor, e.g., an allosteric inhibitor, e.g., RAD001, at a dosage that provides a target trough level of 0.1 to 10 ng/ml, 0.1 to 5 ng/ml, 0.1 to 3 ng/ml, 0.1 to 2 ng/ml, or 0.1 to 1 ng/ml.

[1272] In an embodiment a method disclosed herein comprises administering to a subject an mTOR inhibitor, e.g., an allosteric inhibitor, e.g., RAD001, at a dosage that provides a target trough level of 0.2 to 10 ng/ml, 0.2 to 5 ng/ml, 0.2 to 3 ng/ml, 0.2 to 2 ng/ml, or 0.2 to 1 ng/ml.

[1273] In an embodiment a method disclosed herein comprises administering to a subject an mTOR inhibitor, e.g. an, allosteric inhibitor, e.g., RAD001, at a dosage that provides a target trough level of 0.3 to 10 ng/ml, 0.3 to 5 ng/ml, 0.3 to 3 ng/ml, 0.3 to 2 ng/ml, or 0.3 to 1 ng/ml.

[1274] In an embodiment a method disclosed herein comprises administering to a subject an mTOR inhibitor, e.g., an allosteric inhibitor, e.g., RAD001, at a dosage that provides a target trough level of 0.4 to 10 ng/ml, 0.4 to 5 ng/ml, 0.4 to 3 ng/ml, 0.4 to 2 ng/ml, or 0.4 to 1 ng/ml.

[1275] In an embodiment a method disclosed herein comprises administering to a subject an mTOR inhibitor, e.g., an allosteric inhibitor, e.g., RAD001, at a dosage that provides a target trough level of 0.5 to 10 ng/ml, 0.5 to 5 ng/ml, 0.5 to 3 ng/ml, 0.5 to 2 ng/ml, or 0.5 to 1 ng/ml.

[1276] In an embodiment a method disclosed herein comprises administering to a subject an mTOR inhibitor, e.g., an allosteric inhibitor, e.g., RAD001, at a dosage that provides a target trough level of 1 to 10 ng/ml, 1 to 5 ng/ml, 1 to 3 ng/ml, or 1 to 2 ng/ml.

[1277] As used herein, the term “trough level” refers to the concentration of a drug in plasma just before the next dose, or the minimum drug concentration between two doses.

[1278] In some embodiments, a target trough level of RAD001 is in a range of between about 0.1 and 4.9 ng/ml. In an embodiment, the target trough level is below 3 ng/ml, e.g., is between 0.3 or less and 3 ng/ml. In an embodiment, the target trough level is below 3 ng/ml, e.g., is between 0.3 or less and 1 ng/ml.

[1279] In a further aspect, the invention can utilize an mTOR inhibitor other than RAD001 in an amount that is associated with a target trough level that is bioequivalent to the specified target trough level for RAD001. In an embodiment, the target trough level for an mTOR inhibitor other than RAD001, is a level that gives the same level of mTOR inhibition (e.g., as measured by a method described herein, e.g., the inhibition of P70 S6) as does a trough level of RAD001 described herein.

Pharmaceutical Compositions: mTOR Inhibitors

[1280] In one aspect, the present invention relates to pharmaceutical compositions comprising an mTOR inhibitor, e.g., an mTOR inhibitor as described herein, formulated for use in combination with CAR cells described herein.

[1281] In some embodiments, the mTOR inhibitor is formulated for administration in combination with an additional, e.g., as described herein.

[1282] In general, compounds of the invention will be administered in therapeutically effective amounts as described above via any of the usual and acceptable modes known in the art, either singly or in combination with one or more therapeutic agents.

[1283] The pharmaceutical formulations may be prepared using conventional dissolution and mixing procedures. For example, the bulk drug substance (e.g., an mTOR inhibitor or stabilized form of the compound (e.g., complex with a cyclodextrin derivative or other known complexation agent) is dissolved in a suitable solvent in the presence of one or more of the excipients described herein. The mTOR inhibitor is typically formulated into pharmaceutical dosage forms to provide an easily controllable dosage of the drug and to give the patient an elegant and easily handleable product.

[1284] Compounds of the invention can be administered as pharmaceutical compositions by any conventional route, in particular enterally, e.g., orally, e.g., in the form of tablets or capsules, or parenterally, e.g., in the form of injectable solutions or suspensions, topically, e.g., in the form of lotions, gels, ointments or creams, or in a nasal or suppository form. Where an mTOR inhibitor is administered in combination with (either simultaneously with or separately from) another agent as described herein, in one aspect, both components can be administered by the same route (e.g., parenterally). Alternatively, another agent may be administered by a different route relative to the mTOR inhibitor. For example, an mTOR inhibitor may be administered orally and the other agent may be administered parenterally.

### Sustained Release

[1285] mTOR inhibitors, e.g., allosteric mTOR inhibitors or catalytic mTOR inhibitors, disclosed herein can be provided as pharmaceutical formulations in form of oral solid dosage forms comprising an mTOR inhibitor disclosed herein, e.g., rapamycin or RAD001, which satisfy product stability requirements and/or have favorable pharmacokinetic properties over the immediate release (IR) tablets, such as reduced average plasma peak concentrations, reduced inter- and intra-patient variability in the extent of drug absorption and in the plasma peak concentration, reduced Cₘₐₓ/Cₘᵢₙ ratio and/or reduced food effects. Provided pharmaceutical formulations may allow for more precise dose adjustment and/or reduce frequency of adverse events thus providing safer treatments for patients with an mTOR inhibitor disclosed herein, e.g., rapamycin or RAD001.

[1286] In some embodiments, the present disclosure provides stable extended release formulations of an mTOR inhibitor disclosed herein, e.g., rapamycin or RAD001, which are multi-particulate systems and may have functional layers and coatings.

[1287] The term “extended release, multi-particulate formulation as used herein refers to a formulation which enables release of an mTOR inhibitor disclosed herein, e.g., rapamycin or RAD001, over an extended period of time e.g. over at least 1, 2, 3, 4, 5 or 6 hours. The extended release formulation may contain matrices and coatings made of special excipients, e.g., as described herein, which are formulated in a manner as to make the active ingredient available over an extended period of time following ingestion.

[1288] The term “extended release” can be interchangeably used with the terms “sustained release” (SR) or “prolonged release”. The term “extended release” relates to a pharmaceutical formulation that does not release active drug substance immediately after oral dosing but over an extended in accordance with the definition in the pharmacopoeias Ph. Eur. (7^{th} edition) mongraph for tablets and capsules and USP general chapter <1151> for pharmaceutical dosage forms. The term “Immediate Release” (IR) as used herein refers to a pharmaceutical formulation which releases 85% of the active drug substance within less than 60 minutes in accordance with the definition of “Guidance for Industry: “Dissolution Testing of Immediate Release Solid Oral Dosage Forms” (FDA CDER, 1997). In some embodiments, the term “immediate release” means release of everolismus from tablets within the time of 30 minutes, e.g., as measured in the dissolution assay described herein.

[1289] Stable extended release formulations of an mTOR inhibitor disclosed herein, e.g., rapamycin or RAD001, can be characterized by an in-vitro release profile using assays known in the art, such as a dissolution assay as described herein: a dissolution vessel filled with 900 mL phosphate buffer pH 6.8 containing sodium dodecyl sulfate 0.2% at 37° C. and the dissolution is performed using a paddle method at 75 rpm according to USP by according to USP testing monograph 711, and Ph. Eur. testing monograph 2.9.3. respectively.

[1290] In some embodiments, stable extended release formulations of an mTOR inhibitor disclosed herein, e.g., rapamycin or RAD001, release the mTOR inhibitor in the in-vitro release assay according to following release specifications:

[1291] 0.5 h: <45%, or <40, e.g., <30%

[1292] 1 h: 20-80%, e.g., 30-60%

[1293] 2 h: >50%, or >70%, e.g., >75%

[1294] 3 h: >60%, or >65%, e.g., >85%, e.g., >90%.

[1295] In some embodiments, stable extended release formulations of an mTOR inhibitor disclosed herein, e.g., rapamycin or RAD001, release 50% of the mTOR inhibitor not earlier than 45, 60, 75, 90, 105 min or 120 min in the in-vitro dissolution assay.

### Biopolymer Delivery Methods

[1296] In some embodiments, one or more CAR-expressing cells as disclosed herein can be administered or delivered to the subject via a biopolymer scaffold, e.g., a biopolymer implant. Biopolymer scaffolds can support or enhance the delivery, expansion, and/or dispersion of the CAR-expressing cells described herein. A biopolymer scaffold comprises a biocompatible (e.g., does not substantially induce an inflammatory or immune response) and/or a biodegradable polymer that can be naturally occurring or synthetic.

[1297] Examples of suitable biopolymers include, but are not limited to, agar, agarose, alginate, alginate/calcium phosphate cement (CPC), beta-galactosidase (β-GAL), (1,2,3,4,6-pentaacetyl a-D-galactose), cellulose, chitin, chitosan, collagen, elastin, gelatin, hyaluronic acid collagen, hydroxyapatite, poly(3-hydroxybutyrate-co-3-hydroxy-hexanoate) (PHBHHx), poly(lactide), poly(caprolactone) (PCL), poly(lactide-co-glycolide) (PLG), polyethylene oxide (PEO), poly(lactic-co-glycolic acid) (PLGA), polypropylene oxide (PPO), polyvinyl alcohol) (PVA), silk, soy protein, and soy protein isolate, alone or in combination with any other polymer composition, in any concentration and in any ratio. The biopolymer can be augmented or modified with adhesion- or migration-promoting molecules, e.g., collagen-mimetic peptides that bind to the collagen receptor of lymphocytes, and/or stimulatory molecules to enhance the delivery, expansion, or function, e.g., anti-cancer activity, of the cells to be delivered. The biopolymer scaffold can be an injectable, e.g., a gel or a semi-solid, or a solid composition.

[1298] In some embodiments, CAR-expressing cells described herein are seeded onto the biopolymer scaffold prior to delivery to the subject. In embodiments, the biopolymer scaffold further comprises one or more additional therapeutic agents described herein (e.g., another CAR-expressing cell, an antibody, or a small molecule) or agents that enhance the activity of a CAR-expressing cell, e.g., incorporated or conjugated to the biopolymers of the scaffold. In embodiments, the biopolymer scaffold is injected, e.g., intratumorally, or surgically implanted at the tumor or within a proximity of the tumor sufficient to mediate an anti-tumor effect. Additional examples of biopolymer compositions and methods for their delivery are described in Stephan et al., Nature Biotechnology, 2015, 33:97-101; and WO2014/110591.

### Pharmaceutical Compositions and Treatments

[1299] Pharmaceutical compositions of the present invention may comprise a CAR-expressing cell, e.g., a plurality of CAR-expressing cells, as described herein, in combination with one or more pharmaceutically or physiologically acceptable carriers, diluents or excipients. Such compositions may comprise buffers such as neutral buffered saline, phosphate buffered saline and the like; carbohydrates such as glucose, mannose, sucrose or dextrans, mannitol; proteins; polypeptides or amino acids such as glycine; antioxidants; chelating agents such as EDTA or glutathione; adjuvants (e.g., aluminum hydroxide); and preservatives. Compositions of the present invention are in one aspect formulated for intravenous administration.

[1300] Pharmaceutical compositions of the present invention may be administered in a manner appropriate to the disease to be treated (or prevented). The quantity and frequency of administration will be determined by such factors as the condition of the patient, and the type and severity of the patient's disease, although appropriate dosages may be determined by clinical trials.

[1301] In one embodiment, the pharmaceutical composition is substantially free of, e.g., there are no detectable levels of a contaminant, e.g., selected from the group consisting of endotoxin, mycoplasma, replication competent lentivirus (RCL), p24, VSV-G nucleic acid, HIV gag, residual anti-CD3/anti-CD28 coated beads, mouse antibodies, pooled human serum, bovine serum albumin, bovine serum, culture media components, vector packaging cell or plasmid components, a bacterium and a fungus. In one embodiment, the bacterium is at least one selected from the group consisting of Alcaligenes faecalis, Candida albicans, Escherichia coli, Haemophilus influenza, Neisseria meningitides, Pseudomonas aeruginosa, Staphylococcus aureus, Streptococcus pneumonia, and Streptococcus pyogenes group A.

[1302] When “an immunologically effective amount,” “an anti-tumor effective amount,” “a tumor-inhibiting effective amount,” or “therapeutic amount” is indicated, the precise amount of the compositions of the present invention to be administered can be determined by a physician with consideration of individual differences in age, weight, tumor size, extent of infection or metastasis, and condition of the patient (subject). It can generally be stated that a pharmaceutical composition comprising the immune effector cells (e.g., T cells, NK cells) described herein may be administered at a dosage of 10⁴ to 10⁹ cells/kg body weight, in some instances 10⁵ to 10⁶ cells/kg body weight, including all integer values within those ranges. T cell compositions may also be administered multiple times at these dosages. The cells can be administered by using infusion techniques that are commonly known in immunotherapy (see, e.g., Rosenberg et al., New Eng. J. of Med. 319:1676, 1988).

[1303] In certain aspects, it may be desired to administer activated immune effector cells (e.g., T cells, NK cells) to a subject and then subsequently redraw blood (or have an apheresis performed), activate immune effector cells (e.g., T cells, NK cells) therefrom according to the present invention, and reinfuse the patient with these activated and expanded immune effector cells (e.g., T cells, NK cells). This process can be carried out multiple times every few weeks. In certain aspects, immune effector cells (e.g., T cells, NK cells) can be activated from blood draws of from 10 cc to 400 cc. In certain aspects, immune effector cells (e.g., T cells, NK cells) are activated from blood draws of 20 cc, 30 cc, 40 cc, 50 cc, 60 cc, 70 cc, 80 cc, 90 cc, or 100 cc.

[1304] The administration of the subject compositions may be carried out in any convenient manner, including by aerosol inhalation, injection, ingestion, transfusion, implantation or transplantation. The compositions described herein may be administered to a patient trans arterially, subcutaneously, intradermally, intratumorally, intranodally, intramedullary, intramuscularly, by intravenous (i.v.) injection, or intraperitoneally. In one aspect, the T cell compositions of the present invention are administered to a patient by intradermal or subcutaneous injection. In one aspect, the T cell compositions of the present invention are administered by i.v. injection. The compositions of immune effector cells (e.g., T cells, NK cells) may be injected directly into a tumor, lymph node, or site of infection.

[1305] In a particular exemplary aspect, subjects may undergo leukapheresis, wherein leukocytes are collected, enriched, or depleted ex vivo to select and/or isolate the cells of interest, e.g., T cells. These T cell isolates may be expanded by methods known in the art and treated such that one or more CAR constructs of the invention may be introduced, thereby creating a CAR T cell of the invention. Subjects in need thereof may subsequently undergo standard treatment with high dose chemotherapy followed by peripheral blood stem cell transplantation. In certain aspects, following or concurrent with the transplant, subjects receive an infusion of the expanded CAR T cells of the present invention. In an additional aspect, expanded cells are administered before or following surgery.

[1306] The dosage of the above treatments to be administered to a patient will vary with the precise nature of the condition being treated and the recipient of the treatment. The scaling of dosages for human administration can be performed according to art-accepted practices. The dose for CAMPATH, for example, will generally be in the range 1 to about 100 mg for an adult patient, usually administered daily for a period between 1 and 30 days. The preferred daily dose is 1 to 10 mg per day although in some instances larger doses of up to 40 mg per day may be used (described in U.S. Pat. No. 6,120,766).

[1307] In one embodiment, the CAR is introduced into immune effector cells (e.g., T cells, NK cells), e.g., using in vitro transcription, and the subject (e.g., human) receives an initial administration of CAR immune effector cells (e.g., T cells, NK cells) of the invention, and one or more subsequent administrations of the CAR immune effector cells (e.g., T cells, NK cells) of the invention, wherein the one or more subsequent administrations are administered less than 15 days, e.g., 14, 13, 12, 11, 10, 9, 8, 7, 6, 5, 4, 3, or 2 days after the previous administration. In one embodiment, more than one administration of the CAR immune effector cells (e.g., T cells, NK cells) of the invention are administered to the subject (e.g., human) per week, e.g., 2, 3, or 4 administrations of the CAR immune effector cells (e.g., T cells, NK cells) of the invention are administered per week. In one embodiment, the subject (e.g., human subject) receives more than one administration of the CAR immune effector cells (e.g., T cells, NK cells) per week (e.g., 2, 3 or 4 administrations per week) (also referred to herein as a cycle), followed by a week of no CAR immune effector cells (e.g., T cells, NK cells) administrations, and then one or more additional administration of the CAR immune effector cells (e.g., T cells, NK cells) (e.g., more than one administration of the CAR immune effector cells (e.g., T cells, NK cells) per week) is administered to the subject. In another embodiment, the subject (e.g., human subject) receives more than one cycle of CAR immune effector cells (e.g., T cells, NK cells), and the time between each cycle is less than 10, 9, 8, 7, 6, 5, 4, or 3 days. In one embodiment, the CAR immune effector cells (e.g., T cells, NK cells) are administered every other day for 3 administrations per week. In one embodiment, the CAR immune effector cells (e.g., T cells, NK cells) of the invention are administered for at least two, three, four, five, six, seven, eight or more weeks.

[1308] In one aspect, CAR-expressing cells of the present inventions are generated using lentiviral viral vectors, such as lentivirus. Cells, e.g., CARTs, generated that way will have stable CAR expression.

[1309] In one aspect, CAR-expressing cells, e.g., CARTs, are generated using a viral vector such as a gammaretroviral vector, e.g., a gammaretroviral vector described herein. CARTs generated using these vectors can have stable CAR expression.

[1310] In one aspect, CARTs transiently express CAR vectors for 4, 5, 6, 7, 8, 9, 10, 11, 12, 13, 14, 15 days after transduction. Transient expression of CARs can be effected by RNA CAR vector delivery. In one aspect, the CAR RNA is transduced into the T cell by electroporation.

[1311] A potential issue that can arise in patients being treated using transiently expressing CAR immune effector cells (e.g., T cells, NK cells) (particularly with murine scFv bearing CARTs) is anaphylaxis after multiple treatments.

[1312] Without being bound by this theory, it is believed that such an anaphylactic response might be caused by a patient developing humoral anti-CAR response, i.e., anti-CAR antibodies having an anti-IgE isotype. It is thought that a patient's antibody producing cells undergo a class switch from IgG isotype (that does not cause anaphylaxis) to IgE isotype when there is a ten to fourteen day break in exposure to antigen.

[1313] If a patient is at high risk of generating an anti-CAR antibody response during the course of transient CAR therapy (such as those generated by RNA transductions), CART infusion breaks should not last more than ten to fourteen days.

### EXAMPLES

[1314] The invention is further described in detail by reference to the following experimental examples. These examples are provided for purposes of illustration only, and are not intended to be limiting unless otherwise specified. Thus, the invention should in no way be construed as being limited to the following examples, but rather, should be construed to encompass any and all variations which become evident as a result of the teaching provided herein.

### Example 1

### SHP1 Inhibition by SSG

[1315] CAR T cells typically undergo hypofunction after injection into tumor-bearing immunodeficient mice that is attributable, in part, to SHP1 activity. The inability to lyse tumors and secrete cytokines in CAR TILs isolated from NSG flank tumors was reversible by exposing them ex vivo to the SHP1 inhibitor, SSG, during the overnight coculture with target tumor cells (FIG. 3). Although this observation supports SHP1 playing a role in CAR TIL hypofunction, the potential of translation to the clinic has been limited due to SSG's well-described side effects of phlebotoxicity and pancreatitis.

### Example 2

### Full-Length Dominant Negative SHP1

[1316] Because of the side effect issues cited in Example 1, human T cells were genetically modified with full-length dominant-negative versions of SHP1 based on point mutations (amino-acid substitutions) previously published (Paling N R, Welham M J. Biochem J 2002 Dec. 15; 368(Pt 3):885-94). Two versions were tested in comparison to wild-type SHP1 (WT): 1) R459M and 2) C453S. Plasmids encoding for WT or mutated SHP1 were first transfected into human tumor cells and SHP1 activity was measured using a kit whose readout is the fluorescence emitted by the presence of free phosphates. Compared to WT plasmid, the two mutant plasmids led to a significant decrease in SHP1 activity (FIG. 4). The mutant constructs were then subcloned into a T7 promoter-driven mRNA transcription plasmid and mRNA encoding for WT and mutated SHP1's were made. Bead-activated T cells transduced with mesothelin CAR lentivirus underwent electroporation with the mRNAs. 24 hours later, a co-culture killing assay was done to test the effects of the SHP1 mutants on CAR directed killing. There was a statistically significant increase in 18 hr lysis of mesothelin-expressing tumor targets conferred by the C453S mutation (FIG. 5).

[1317] However, achieving reasonable co-expression and function of the SHP1 mutant with CAR was technically very challenging due to three reasons:
[1318] 1) For permanent transfection, mutated SHP1 is difficult to co-express at high frequency with CAR due to the two constructs being at the maximum packaging limit of lentivirus.
[1319] 2) The modest expression levels of mutated SHP1 are incapable of successfully interfering with wild-type/native SHP1 which is expressed in abundant amounts in effector T cells. 3) mRNA electroporation can be toxic to T cells and only allows for a limited time of expression (around 6 days).

### Example 3

### siRNA/shRNA Knockdown of SHP1

[1320] Knockdown of SHP1 via siRNA/shRNA was also evaluated. However, multiple attempts at modifying T cells with siRNA via electroporation or shRNA via viral transduction were hindered by toxicity as manifested by suppressed proliferation after anti-CD3/28 bead activation (FIG. 6).

### Example 4

### SH2-N as Inhibitor of SHP1

[1321] In light of these hurdles, an alternative way to interfere with SHP1 activity was investigated, with a focus on meeting two criteria:
[1322] 1) Avoid having to use siRNA/shRNA.
[1323] 2) Find an inhibitor with a short gene length that in combination with the CAR gene would be well below the total gene length limitation for lentivirus packaging.

[1324] Detailed molecular information about how SHP1 works was utilized. The catalytic site of SHP1 is normally occupied by the N-terminus of its SH2 domain (SH2-N). This self binding keeps SHP1 in its non-catalytic conformation (Poole A W, Jones M L. A SHPing tale: perspectives on the regulation of SHP-1 and SHP-2 tyrosine phosphatases by the C-terminal tail. Cell Signal 2005 November; 17(11):1323-32). SH2-N releases from the catalytic domain upon recognition of phosphorylated tyrosine motifs (pTyr) on immunoreceptor tyrosine-based inhibition motifs (ITIMs), which are located on the cytoplasmic tails of IRs like PD1 (Yaffe M B. Nat Rev Mol Cell Biol 2002 March; 3(3):177-86; Hampel K, Kaufhold I, Zacharias M, Bohmer F D, Imhof D. Chem Med Chem 2006 August; 1(8):869-77) (FIG. 7). Once the SH2-domain binds to the ITIM, the catalytic activity of SHP1 is “released”.

[1325] Expressing the endogenous SH2-N domain of SHP1 along with the CAR was considered, with the idea that it would occupy the catalytic site and reduce SHP1 function. However, given that this small protein would also bind to phosphorylated ITIMs and be pulled away from the SHP1 catalytic site, it was hypothesized that mutating the SH2-N domain residues that were involved in ITIM binding would make a protein less likely to be dislodged from the SHP1 catalytic site and thus be a better inhibitor.

[1326] Based on this hypothesis, gene sequences encoding for SH2-N with and without an amino-acid mutation (R30K) in the pTyr recognition site were designed. The sequence for SH2-N was based off a previously published sequence (Teichmann, #999; Poole, 2005. #596). The mutation was based off of previously published description of the sequence within SH2-N which recognizes the phosphorylated tyrosine motif (Thaventhiran T, Sethu S, Yeang H X, Laith A H, Hamdam J, Sathish J G. J Clin Cell Immunol 2012;S12:1-12. #612; Hampel, 2006. #576). The specific mutation was designed to disrupt the ability of SH2-N occupying the enzymatic cleft of SHP1 to recognize phosphorylated tyrosine motifs releasing it from the cleft. This minigene was incorporated into a lentiviral expression plasmid encoding for CAR using a bicistronic 2A platform. Experiments were performed to gather in-vitro and in-vivo data describing the SH2-N-R30K's ability to augment CAR T cell function.

### Example 5

### SH2-N and CAR Constructs

[1327] The SH2-N and the SH2-N-R30K constructs were designed and ordered from IDT (Coralville, Iowa) (FIG. 8).

[1328] These sequences were then subcloned into a lentiviral expression plasmid encoding for the mesothelin directed CAR, SS1BBz, utilizing standard molecular biology techniques (Carpenito C, Milone M C, Hassan R, Simonet J C, Lakhal M, Suhoski M M, et al. Proc Natl Acad Sci USA 2009 Mar. 3; 106(9):3360-5) (FIG. 9). Unlike previous larger DN constructs (see Example 2), high titer lentivirus was easily packaged using 293T cells according to standard protocols utilizing third generation lentivirus packaging plasmids.

### Example 6

### Cytokine Production of Transduced T Cells

[1329] CD8 and CD4 human T cells acquired from healthy donors from Penn's Human Immunology Core were subjected to anti-CD3/CD28 bead activation. They were then transduced with lentivirus encoding for CAR, CAR/SH2-N, and CAR/SH2-N-R30K. Flow-cytometry analysis confirmed a transduction efficiency of approximately 50% across all three T cell types. After “resting down”, the T cells were then re-stimulated with plate-bound anti-CD3 antibody in the presences of Golgi-stop and Golgi-plug (BD, San Jose, Calif.) and were subjected to intracellular cytokine detection via flow cytometry. The hypothesis was that CAR T cells with inhibited SHP1 would activate more vigorously with TCR stimulation.

[1330] Analyzing the transduced CD8+ T cells, the SH2-N and SH2-N-R30K expressing T cells had the greatest percentage of cytokine producing cells, with SH2-N-R30K T cells having the greatest % of IL2 producers (FIG. 10). This was especially true on those transduced CD8+ T cells that had PD1 expression. Thus, for example, after CD3 stimulation, the percent of CD8 cells making IL2 was 4.3% in non-transduced T cells, 3.8% in T cells transduced with CARs, 7.2% in T cells transduced with the CAR/SH2-N construct, but 94.4% in the CAR/SH2-N-R30K construct.

### Example 7

### In Vitro Tumor Cell Lysis Assay

[1331] Next, to look at antigen-specific activity, the in-vitro killing ability of T cells prepared as described in Example 6 was tested. The different T cells were co-cultured with mesothelin-expressing tumor target cells (a human mesothelioma cell line, EMMESO, with constitutive expression of high levels of mesothelin and transduced to stably express firefly luciferase for purposes of measuring lytic activity via luminescence measurements) at different E:T ratios. This was also done with an EMMESO cell line transduced to stably express high levels of PDL1 (EMMESO-PDL1). CAR, CAR/SH2-N, and CAR/SH2-N-R30K T cells demonstrated very similar killing ability at four different E:T ratios over 18 hr of co-culture with EMMESO (FIG. 11, top). CAR T cell lytic activity was much reduced when reacted with high PDL1-expressing EMMESO cells (FIG. 11, bottom). The SH2-N and SH2-N-R30K CAR T cells showed significantly enhanced lytic ability when reacted against the PDL1-high tumor cells. This was especially true for the CAR/SH2-N-R30K T cells which demonstrated greater lytic ability of EMMESO-PDL1 cells than the CAR/SH1-N T cells. These data show that overexpression of the SH2-N domain of SHP1 in CAR T cells can augment cytokine secretion and in vitro tumor lytic ability especially in those CAR T cells expressing PD1. The R30K mutation, which prohibited recognition of phosphorylated tyrosines by and release of SH2-N piece, led to greater enhancement of cytokine secretion (e.g. IL2) and antigen-specific tumor lysis.

### Example 8

### In Vivo Anti-Tumor Activity

[1332] An in-vivo experiment testing the ability of the SHP1-based constructs to augment

[1333] CAR T cell anti-tumor activity was also conducted. NOD-scid IL2rγnull (NSG) mice of 6-8 weeks were injected subcutaneously in the flank with 5 million EMMESO-PDL1 tumor cells. After about 2 weeks, the established flank tumors reached a size of approximately 100 mm³. At this point, mice were randomly assigned to receive NTD T cells, NTD T cells+SSG (20 mg/kg every 2 days), CAR T cells, CAR T cells+SSG (20 mg/kg every 2 days), CAR/SH2-N T cells, or CAR/SH2-N-R30K T cells. The mice were injected with one dose of 10 million T cells per mouse via tail-vein. SSG injections were performed intramuscularly in the hind legs.

[1334] Caliper measurements of the flank tumor size revealed the slowing of tumor by the CAR T cells (FIG. 12, dark blue line vs. green line). There was no statistically significant augmentation of CAR T cell anti-tumor function by SSG injection. The SH2-N modification also did not lead to any significant augmentation of CAR T cell anti-tumor function (FIG. 12, light blue and green lines). The growth of the tumors in the CAR and the CAR/SH2-N T cell treated mice were essentially identical. The R30K modification was necessary to induce significant augmentation of CAR T cell anti-tumor activity. The SH2-N-R30K modification led to enhanced T cell control of EMMESO-PDL1 growth by more than 50% (FIG. 12, orange line).

### Example 9

### Mechanism Experiments

[1335] To evaluate the possible mechanisms underlying the results of the in-vivo experiment of Example 8, 27 days after T cell injection, the mice were sacrificed. The tumors were harvested and processed into single cell suspensions and subjected to flow cytometric analysis to examine the degree of TIL infiltration and IR expression. Compared to the mice that received CAR, CAR/SSG, and CAR/SH2-N, those mice that received CAR/SH2-N-R30K had significantly more TIL infiltration (37% of the tumor digest vs. 5-12%) (FIG. 13). Additionally, flow cytometry analysis revealed significantly less upregulation of PD1 and other IRs (i.e. Tim3/CEACAM1) on the CD8 population of TILs in the CAR/SH2-N-R30K TILs than the CAR TILs (FIG. 14).

[1336] The TILs were then isolated from the tumor digests using anti-CD45 based magnetic beads. Subsequently, the TILs were cocultured with EMMESO and EMMESO-PDL1 at different E:T ratios to test their ex-vivo anti-tumor activity. Isolated CAR TILs were significantly hypofunctional in their ability to lyse fresh tumor cells when compared to cryopreserved CAR T cells (cryoCAR; uninjected CAR T cells) (FIG. 15; “ cryoCAR” vs. “CAR TIL”). However, at multiple E:T ratios, especially at the lower ratios of 2.5:1 and 1.25:1, the CAR/SH2-N-R30K demonstrated significantly greater ex-vivo killing of both EMMESO and EMMESO-PDL1 tumor cells than CAR TILs (FIG. 15; “CAR/SH2-N-R30K TIL” vs. “CAR TIL”).

[1337] These data show that the truncated tail of SHP1 is able to augment the anti-tumor function of adoptively transferred human CAR T cells in animals bearing human solid tumors through multiple mechanisms that include: 1) by increasing the infiltration of CAR T cells into the tumor, 2) by leading to a less hypofunctional phenotype of CAR TIL as measured by expression of PD1, Tim3, and CEACAM1, and 3) by increased preservation of ex vivo tumor-lytic function. The SH2-N construct was unable to enhance in-vivo activity of CAR T cells. While not wishing to be bound by theory, the most likely reason is that although the SH2-N occupies the enzymatic cleft of SHP1, it can easily release upon recognizing phosphorylated tyrosine motifs (like those on PD1), leaving SHP1's immunosuppressive function intact. Thus, the R30K mutation is required in the SH2-N construct to keep it in the enzymatic cleft of SHP1.

[1338] In summary, the expression of the SH2-N-R30K domain in T cells can significantly augment the efficacy of adoptive CAR T cell therapy by increasing their effector function, particularly in the setting where IR checkpoint inhibition from molecules like PD1 is important. Addition of this SHP1 inhibitory protein could be used in T cells derived from blood, cord blood, bone marrow, and iPSC. This technology could be used to enhance T cell therapy in an anti-cancer setting, and also in chronic viral infections. This approach should work with CAR targeted to any antigen. It should also work equally well in any adoptively transferred T cells, for example T cells expressing transgenic TCRs.

### Example 10

### Further Embodiments and Considerations

[1339] Experiments are performed to test the anti-tumor activity of human CAR/SH2-N-R30K T cells using other tumor models, particularly tumors that express ligands binding to multiple IRs that are reported to signal through SHP1. In another experiment, a similar dominant-negative gene is introduced to interfere with SHP2 (another phosphatase similar to SHP1) that has also been suggested to be involved in PD1 signaling, but is less well characterized. An experiment is performed that compares unmodified CAR T cells with those transduced with each of SHP1 and SHP2 dominant-negative genes. An experiment is performed to test the effect of the two dominant-negative genes combined.

[1340] T cells expressing the SH2-N-R30K domain can be used to inhibit tumor growth as a monotherapy and/or have additive or synergistic anti-tumor activity given in combination with other tumor-cell directed therapies. Adoptive cell therapies are likely to include the development of CAR T cells and T cells expressing transgenic TCRs.

[1341] Success with CAR therapy has been achieved in hematologic tumors, but there has been less success reported in solid cancers. One reason for this may be the rapid inactivation of CAR function by the triggering of multiple IRs, like PD1. If this is the case, CAR T cells used to treat solid tumors will need to be resistant to multiple IR signaling pathways. The SH2-N-R30K construct, which can easily be inserted into any CAR (or T cells with transgenic TCRs) in a bicistronic fashion, will accomplish this goal. The SH2-N-R30K transgene is useful for the purpose of solid cancer therapies, further improving the efficacy of CAR T cells or transgenic TCR-expressing T cells.

[1342] Published studies have examined murine T cells with a conditional knockout of SHP1 demonstrating the ability to augment tumor control by effector T cells in a murine model of leukemia (Stromnes I M, Fowler C, Casamina C C, Georgopolos C M, McAfee M S, Schmitt T M, et al. J Immunol August 15; 189(4):1812-25). However, the technology of the present invention is different in that it offers two significant advantages—1) it can successfully abrogate SHP1 signaling in human effector T cells, 2) it can successfully augment tumor control using adoptively transferred T cells against solid tumors, which is the significant hurdle for this field of immunotherapy.

[1343] Several approaches are being researched to improve T cell efficacy in solid tumors, for example, a peptide that blocks PGE2 and adenosine inhibition (RIAD protein). It is possible combinations (e.g., of RIAD and SH2-N-R30K) will be needed.

[1344] There is a chemical compound called sodium stibogluconate (SSG) that is also known to interfere with SHP-1 as well as other protein tyrosine phosphatases. It is used to treat leishmaniasis, but has also been shown to partially reverse the dysfunction of PD1+ TILs. However, due to SSG's well-known adverse effects of pancreatic and phlebotoxicity, we feel the genetic method of interfering with SHP1 signaling, presented herein, is safer and more specific and would allow patients to avoid multiple injections of SSG.

### Example 11

### Exemplary Experiments with SHP Inhibitor Polypeptide

### Background:

[1345] Immunotherapy using chimeric antigen receptor (CAR) T cells has demonstrated profound, durable success in hematologic malignancies. Solid tumors present hurdles to the successful application of CAR T cells. One is the upregulation of inhibitory receptors (IRs), like PD1 and CTLA4, many of which rely on shared signaling molecules to shut off T cell activation. One such molecule is SHP1 (Src homology region 2 dominant-negative SHP1 (dnSHP1) that is able to augment CAR T cell control of PDL1 positive solid tumors.

### Materials and Methods:

[1346] The human mesothelioma cell line, EMP, was transduced to express high levels of mesothelin and PDL1 (EMMESO-PDL1). Activated human T cells from healthy donors were lentivirally transduced to express a mesothelin-directed CAR (mesoCAR) with and without a dnSHP1. MesoCAR and mesoCAR/dnSHP1 T cells were cocultured with tumor cells×18 hrs and specific lysis was measured. These T cells were also restimulated with plate-bound anti-CD3 overnight and were subjected to intracellular flow cytometry staining (ICS) of cytokines. NSG mice were injected subcutaneously in the flanks with 5×10⁶ EMMESO-PDL1 tumor cells. After tumors established and grew to ˜150 mm³, mice were randomly assigned to one of the following treatments: 1) non-transduced (NTD) T cells, 2) mesoCAR T cells, 3) mesoCAR T cells+sodium stibogluconate (SSG; a chemical inhibitor of SHP1), 4) mesoCAR/dnSHP1 T cells. T cells were injected IV once at a dose of 10×10⁶ T cells/mouse. SSG was administered IM at 20 mg/kg every 2 days. Tumors were measured serially. AT the end, mice were sacrificed, tumors were harvested, digested, processed into single cell suspension, and subjected to flow cytometry analysis. The tumor infiltrating lymphocytes (TILs) were also isolated and tested for function ex-vivo.

### Results/Conclusion:

[1347] In vitro, mesoCAR T cells demonstrated suppressed lysis of EMMESO-PDL1 tumor cells compared to EMMESO cells. MesoCAR/dnSHP1 T cells were able to lyse EMMESO-PDL1 and EMMESO tumor cells with similar efficiency. AntiCD3 restimulation of T cells revealed enhanced secretion of TNF-alpha and IL2 by mesoCAR/dnSHP1 vs. mesoCAR T cells as measured by ICS. In vivo, SSG injections had minimal impact on mesoCAR T cell control of tumors, whereas mesoCAR/dnSHP1 T cells demonstrated significantly enhanced control of EMMESO-PDL1 tumor growth compared to mesoCAR T cells (60% greater decrease in tumor volume compared to mesoCAR T cells). TIL infiltration was 3-fold higher in tumors harvested from mice that received mesoCAR/dnSHP1 T cells compared to other groups. Isolated mesoCAR/dnSHP1 TILs demonstrated the greatest ex-vivo lysis of fresh tumor cells. DnSHP1 engineering is a powerful and novel way of blocking the suppression of CAR T cells by PD1 and other similar IRs.

### Example 12

### Impact of Dominant Negative SHP on TCR Signaling and Cytokine Production in the Presence of PD-L1

[1348] This example examines the impact of dominant negative SHP (dnSHP) on T cells in the presence of PD-L1-expressing tumor cells.

[1349] T cells were transduced to express the mesothelin directed CAR SS1BBz (“CARGFP cells”), SS1BBz and SHP-1 SH2-N R30K (SEQ ID NO: 41) (“dnSHP1 CAR cells”), SS1BBz and SHP-2 SH2-N R32K (SEQ ID NO: 44) (“dnSHP2 CAR cells”), or SS1BBz, SHP-1 SH2-N R30K (SEQ ID NO: 41), and SHP-2 SH2-N R32K (SEQ ID NO: 44) (“dnSHP1&2 CAR cells”). The construct co-expressing SHP-1 SH2-N R30K and SHP-2 SH2-N R32K comprises the nucleotide sequence of SEQ ID NO: 51. In this construct, the nucleotide sequence encoding SHP-1 SH2-N R30K (SEQ ID NO: 63) and the nucleotide sequence encoding SHP-2 SH2-N R32K (SEQ ID NO: 64) are separated by a nucleotide sequence encoding the P2A cleavage site.

(SEQ ID NO: 51)

atggtgcgatggatcaccgagatctgagcggtctggatgccgaaacgctg
ctgaaaggccgcggagtacacggatccttcctggcaaagcctagtcgaaa
aaaccaaggagacttttccttgagcgttcgggtgggtgatcaggtaactc
acatccgaatccaaaattccggcgattatatgatctgtacggaggcgaaa
aattcgcaactctgaccgagctggtcgagtattatacacagcagcaggga
gtactgcaggaccgcgatgggaccatcattcatctcaaatacccgctgGG
AAGCGGAGCTACTAACTTCAGCCTGCTGAAGCAGGCTGGAGACGTGGAGG
AGAACCCTGGACCTATGACAAGTAGAAGGTGGTTCCATCCAAACATTACG
GGGGTGGAAGCTGAAAACCTTCTGCTCACGAGGGGTGTGGACGGTTCTTT
CCTTGCCAAACCGAGTAAATCTAATCCCGGTGATTTCACTCTTTCCGTTC
GCCGGAATGGAGCAGTCACACACATAAAAATCCAGAACACGGGTGACTAT
TATGATCTGTATGGCGGGGAGAAGTTTGCAACTCTGGCAGAACTGGTGCA
GTATTACATGGAGCACCATGGGCAACTGAAGGAGAAGAATGGAGATGTTA
TTGAACTGAAGTATCCATTG

(SEQ ID NO: 63)

atggtgcgatggatcaccgagatctgagcggtctggatgccgaaacgctg
ctgaaaggccgcggagtacacggatccttcctggcaaagcctagtcgaaa
aaaccaaggagacttttccttgagcgttcgggtgggtgatcaggtaactc
acatccgaatccaaaattccggcgattatatgatctgtacggaggcgaaa
aattcgcaactctgaccgagctggtcgagtattatacacagcagcaggga
gtactgcaggaccgcgatgggaccatcattcatctcaaatacccgctg

(SEQ ID NO: 64)

ATGACAAGTAGAAGGTGGTTCCATCCAAACATTACGGGGGTGGAAGCTGA
AAACCTTCTGCTCACGAGGGGTGTGGACGGTTCTTTCCTTGCCAAACCGA
GTAAATCTAATCCCGGTGATTTCACTCTTTCCGTTCGCCGGAATGGAGCA
GTCACACACATAAAAATCCAGAACACGGGTGACTATTATGATCTGTATGG
CGGGGAGAAGTTTGCAACTCTGGCAGAACTGGTGCAGTATTACATGGAGC
ACCATGGGCAACTGAAGGAGAAGAATGGAGATGTTATTGAACTGAAGTAT
CCATTG

[1350] In a first study, phospho-flow cytometry was performed on activated human CARGFP cells, dnSHP1 CAR cells, dnSHP2 CAR cells, and dnSHP1&2 CAR cells that were co-cultured with EMMESO tumor cells or EMMESO-PD-L1 tumor cells for 0 to 90 minutes. As shown in FIG. 16B, PD-L1 expression on tumor cells decreased the level of phosphorylated Zap70 (pZap70; downstream TCR signaling molecule) on CARGFP T cells. However, CAR T cells with dnSHP1, dnSHP2, or dnSHP1&2 were relatively unaffected (FIG. 16B).

[1351] In a second study, CARGFP cells, dnSHP1 CAR cells, dnSHP2 CAR cells, and dnSHP1&2 CAR cells were co-cultured with EMMESO-PD-L1 tumor cells at 1:1 ratio for 4 days. Fresh tumor cells were fed during the co-culture. At the end of the 4 days, the cells were stimulated for 18 hours with cross-linked anti-CD3 antibody (10 μg/ml) in the presence of monensin/brefeldin and were subjected to intracellular flow cytometry staining. As shown in FIG. 17, CAR T cells with the dnSHP1, dnSHP2, or dnSHP1&2 constructs had greater IFNγ and IL2 staining.

### EQUIVALENTS

[1352] The disclosures of each and every patent, patent application, and publication cited herein are hereby incorporated herein by reference in their entirety. While this invention has been disclosed with reference to specific aspects, it is apparent that other aspects and variations of this invention may be devised by others skilled in the art without departing from the true spirit and scope of the invention. The appended claims are intended to be construed to include all such aspects and equivalent variations.

We claim:

1. A nucleic acid composition comprising
(a) a nucleic acid molecule encoding a chimeric antigen receptor (CAR) polypeptide and
(b) a nucleic acid molecule encoding an SHP inhibitor polypeptide, wherein said SHP inhibitor polypeptide comprises:
(i) a mutation (e.g., one or more deletions or substitutions) in the ITIM-binding region (e.g., an SH2 domain, e.g., the N-terminal SH2 domain) of an SHP polypeptide, and
(ii) a mutation (e.g., one or more deletions or substitutions) in a catalytic domain e.g., the phosphatase domain, of an SHP polypeptide.

2. The nucleic acid composition of claim 1, wherein the SHP inhibitor polypeptide is an SHP-1 polypeptide, e.g., comprises the amino acid sequence of SEQ ID NO:1 or a fragment thereof, or an amino acid sequence at least 90%, 95%, 97%, 98%, or 99% identical to SEQ ID NO:1; or an SHP-2 polypeptide, e.g., comprises the amino acid sequence of SEQ ID NO:2 or a fragment thereof, or an amino acid sequence at least 90%, 95%, 97%, 98%, or 99% identical to SEQ ID NO:2.

3. The nucleic acid composition of claim 1 or 2, wherein the SHP inhibitor polypeptide has reduced binding, compared to a wild-type SHP, to an ITIM domain, e.g., an ITIM domain from one or more of the following proteins: PD1, PDCD1, BTLA4, LILRB1, LAIR1, CTLA4, KIR2DL 1, KIR2DL4, KIR2DL5, KIR3DL 1 or KIR3DL3.

4. The nucleic acid composition of any of the preceding claims, wherein the binding of the SHP inhibitor polypeptide to the ITIM domain is reduced by at least 10%, 20%, 30%, 40%, 50%, 60%, 70%, 80%, 90%, 95%, 97%, or 99% compared to a wild-type SHP.

5. The nucleic acid composition of any of the preceding claims, wherein the SHP inhibitor polypeptide (e.g., SHP-1 polypeptide or SHP-2 polypeptide) is less than 240, 220, 180, 160, 140, 120, 100, 80, 60, or 40 amino acids in length.

6. The nucleic acid composition of claim 5, wherein the SHP inhibitor polypeptide (e.g., SHP-1 polypeptide) comprises amino acids 1-240, 1-220, 1-180, 1-160, 1-140, 1-120, 1-100, 1-80, 1-60, or 1-40 of SEQ ID NO: 1, or an amino acid sequence substantially identical thereto, e.g., at least 90%, 95%, 97%, 98%, or 99% identical thereto.

7. The nucleic acid composition of claim 5, wherein the SHP inhibitor polypeptide (e.g., SHP-1 polypeptide) comprises a sequence at least 90%, 95%, 97%, 98%, or 99% identical to SEQ ID NO: 3, wherein X is any amino acid except R.

8. The nucleic acid composition of claim 5, wherein the SHP inhibitor polypeptide (e.g., SHP-1 polypeptide) comprises a sequence at least 90%, 95%, 97%, 98%, or 99% identical to SEQ ID NO: 3, wherein X is K or H.

9. The nucleic acid composition of claim 5, wherein the SHP inhibitor polypeptide (e.g., SHP-1 polypeptide) comprises a sequence at least 90%, 95%, 97%, 98%, or 99% identical to SEQ ID NO: 3, wherein X is K.

10. The nucleic acid composition of claim 5, wherein the SHP inhibitor polypeptide (e.g., SHP-1 polypeptide) comprises or consists of a sequence according to SEQ ID NO: 3, wherein X is any amino acid except R.

11. The nucleic acid composition of claim 5, wherein the SHP inhibitor polypeptide (e.g., SHP-1 polypeptide) comprises or consists of a sequence according to SEQ ID NO: 3, wherein X is K or H.

12. The nucleic acid composition of claim 5, wherein the SHP inhibitor polypeptide (e.g., SHP-1 polypeptide) comprises or consists of a sequence according to SEQ ID NO: 3, wherein X is K.

13. The nucleic acid composition of claim 5, wherein the SHP inhibitor polypeptide (e.g., SHP-2 polypeptide) comprises amino acids 1-240, 1-220, 1-180, 1-160, 1-140, 1-120, 1-100, 1-80, 1-60, or 1-40 of SEQ ID NO: 2, or an amino acid sequence substantially identical thereto, e.g., at least 90%, 95%, 97%, 98%, or 99% identical thereto.

14. The nucleic acid composition of claim 5, wherein the SHP inhibitor polypeptide (e.g., SHP-2 polypeptide) comprises a sequence at least 90%, 95%, 97%, 98%, or 99% identical to SEQ ID NO: 4, wherein X is any amino acid except R.

15. The nucleic acid composition of claim 5, wherein the SHP inhibitor polypeptide (e.g., SHP-2 polypeptide) comprises a sequence at least 90%, 95%, 97%, 98%, or 99% identical to SEQ ID NO: 4, wherein X is K or H.

16. The nucleic acid composition of claim 5, wherein the SHP inhibitor polypeptide (e.g., SHP-2 polypeptide) comprises a sequence at least 90%, 95%, 97%, 98%, or 99% identical to SEQ ID NO: 4, wherein X is K.

17. The nucleic acid composition of claim 5, wherein the SHP inhibitor polypeptide (e.g., SHP-2 polypeptide) comprises or consists of a sequence according to SEQ ID NO: 4, wherein X is any amino acid except R.

18. The nucleic acid composition of claim 5, wherein the SHP inhibitor polypeptide (e.g., SHP-2 polypeptide) comprises or consists of a sequence according to SEQ ID NO: 4, wherein X is K or H.

19. The nucleic acid composition of claim 5, wherein the SHP inhibitor polypeptide (e.g., SHP-2 polypeptide) comprises or consists of a sequence according to SEQ ID NO: 4, wherein X is K.

20. The nucleic acid composition of any of the preceding claims, wherein the SHP inhibitor polypeptide has reduced phosphatase activity, compared to wild-type SHP, to one or more SHP substrates (e.g., substrates comprising phosphorylated tyrosine).

21. The nucleic acid composition of any of the preceding claims, wherein the SHP inhibitor polypeptide has a deletion of at least part or all of the phosphatase domain.

22. The nucleic acid composition of any of the preceding claims, wherein the SHP inhibitor polypeptide lacks its phosphatase domain.

23. The nucleic acid composition of any of the preceding claims, wherein the SHP inhibitor polypeptide, when expressed in an immune effector cell (e.g., a T cell), does not result (e.g., substantially result, e.g., results in less than 10%, 9%, 8%, 7%, 6%, 5% or less change) in one of more of the following:
(i) inhibition of CAR signalling;
(ii) inhibition of TCR signaling;
(iii) promotion of immune checkpoint inhibition,
(iv) promotion of PD-1/PD-L1 signalling;
(v) inhibition of phosphorylation of CD3z;
(vi) inhibition of LAT (linker for activation of T cells) phosphorylation,
(vii) dephosphorylation of Lck (lymphocyte-specific protein tyrosine kinase), or a combination of two, three, four, five, six or all of (i)-(vii), e.g., compared to an otherwise similar cell that lacks the SHP inhibitor polypeptide.

24. The nucleic acid composition of any of the preceding claims, wherein the SHP inhibitor polypeptide, when expressed in an immune effector cell (e.g., a T cell), results in one or more of:
(i) increased CAR signaling;
(ii) increased TCR signaling;
(iii) reduced immune checkpoint inhibition;
(iv) reduced PD-1/PD-L1 signaling;
(v) increased levels of CD3z phosphorylation;
(vi) increased levels of LAT phosphorylation;
(vii) increased phosphorylation of Lck;
(viii) increased phosphorylation of ZAP70;
(ix) increased expression of a cytokine, e.g., IFNγ or IL2,
or a combination of two, three, four, five, six or all of (i)-(ix), e.g., compared to an otherwise similar cell that lacks the SHP inhibitor polypeptide.

25. The nucleic acid composition of any of the preceding claims, wherein the SHP inhibitor polypeptide, when expressed in an immune effector cell (e.g., a T cell) that also expresses a CAR polypeptide, results in increased cytokine secretion and/or increases the percentage of cytokine-expressing cells, wherein the cytokine is optionally IL-2, compared to an otherwise similar cell lacking the SHP inhibitor polypeptide or an otherwise similar cell comprising a wild-type SHP polypeptide or a wild type SH2-N terminal fragment thereof (e.g., an SHP polypeptide according to amino acids 1-100 of SEQ ID NO:
1, e.g., as shown in FIG. 10).

26. The nucleic acid composition of claim 25, wherein the immune effector cell expresses PD-1.

27. The composition of claim 25 or 26, wherein cytokine secretion is increased by at least 2, 3, 4, 5, 6, 8, 10, 12, 14, 16, 18, or 20-fold.

28. The nucleic acid composition of any of the preceding claims, wherein the SHP inhibitor polypeptide, when expressed in an immune effector cell (e.g., a T cell) that also expresses a CAR polypeptide, results in increased lysis, e.g., in vitro, of cancer cells that express PD-L1 and an antigen recognized by the CAR polypeptide, compared to an otherwise similar cell that lacks the SHP inhibitor polypeptide or an otherwise similar cell comprising a wild type SHP polypeptide or a wild type SH2-N terminal fragment thereof (e.g., an SHP polypeptide according to amino acids 1-100 of SEQ ID NO: 1, e.g., as shown in FIG. 11).

29. The nucleic acid composition of claim 28, wherein the immune effector cell expresses PD-1 and the cancer cell expresses PD-L1.

30. The nucleic acid composition of claim 28 or 29, wherein cancer cell lysis is increased at least 1.1-fold, 1.2-fold, 1.4-fold, 1.6-fold, 1.8-fold, or 2-fold, e.g., compared to cancer cell lysis in response to an otherwise similar cell that lacks the SHP inhibitor polypeptide or an otherwise similar cell comprising a wild type SHP polypeptide, or a wild type SH2-N terminal fragment thereof, e.g., an SHP polypeptide according to amino acids 1-100 of SEQ ID NO: 1, e.g., as shown in FIG. 11.

31. The nucleic acid composition of any of the preceding claims, wherein the SHP inhibitor polypeptide, when expressed in an immune effector cell (e.g., a T cell) that also expresses a CAR polypeptide (e.g., an immune effector cell that expresses PD-1), results in decreased tumor volume (e.g., of a tumor having cells expressing PD-L1 and an antigen recognized by the CAR polypeptide), e.g., in a mouse model, compared to an otherwise similar animal treated with otherwise similar immune effector cells that that lack the SHP inhibitor polypeptide or an otherwise similar cell comprising a wild type SHP polypeptide, or a wild type SH2-N terminal fragment thereof according to amino acids 1-100 of SEQ ID NO: 1, e.g., as shown in FIG. 12.

32. The nucleic acid composition of claim 31, wherein the tumor volume is less by about 10%, 20%, 30%, 40%, 50%, 60%, 70%, 80%, or 90% than the tumor volume at the same timepoint in the presence of an otherwise similar cell that lacks the SHP inhibitor polypeptide or an otherwise similar cell comprising a wild type SHP polypeptide, or a wild type SH2-N terminal fragment thereof according to amino acids 1-100 of SEQ ID NO: 1, e.g., as shown in FIG. 12.

33. The nucleic acid composition of any of the preceding claims, wherein the SHP inhibitor polypeptide, when expressed in an immune effector cell (e.g., a T cell) that also expresses a CAR polypeptide (e.g., an immune effector cell that expresses PD-1), results in increased T lymphocyte infiltration into a tumor, e.g., in a mouse model, compared to an otherwise similar animal treated with otherwise similar immune effector cells that lack the SHP inhibitor polypeptide or an otherwise similar cell comprising a wild type SHP polypeptide, or a wild type SH2-N terminal fragment thereof according to amino acids 1-100 of SEQ ID NO: 1, e.g., as shown in FIG. 13.

34. The nucleic acid composition of claim 33, wherein T lymphocyte infiltration is increased at least 1.1-fold, 1.2-fold, 1.4-fold, 1.6-fold, 1.8-fold, 2-fold, 3-fold, 4-fold, or 5-fold and/or wherein infiltrating T lymphocytes represent at least about 10%, 20%, 30%, 40%, or 50% of cells in the tumor.

35. The nucleic acid composition of any of the preceding claims, wherein the SHP inhibitor polypeptide, when expressed in an immune effector cell (e.g., a T cell) that also expresses a CAR polypeptide, results in increased phosphorylation of ZAP70, e.g., in the presence of PD-L1-expressing tumor cells, compared to an otherwise similar immune effector cell that lacks the SHP inhibitor polypeptide or an otherwise similar cell comprising a wild type SHP polypeptide, or a wild type SH2-N terminal fragment thereof according to amino acids 1-100 of SEQ ID NO: 1, e.g., as shown in FIG. 16B.

36. The nucleic acid composition of any of the preceding claims, wherein the SHP inhibitor polypeptide, when expressed in an immune effector cell (e.g., a T cell) that also expresses a CAR polypeptide, results in increased expression of IFNγ or IL-2 (or increased percentage of IFNγ positive or IL-2 positive cells), e.g., in the presence of PD-L1-expressing tumor cells, compared to an otherwise similar immune effector cell that lacks the SHP inhibitor polypeptide or an otherwise similar cell comprising a wild type SHP polypeptide, or a wild type SH2-N terminal fragment thereof according to amino acids 1-100 of SEQ ID NO: 1, e.g., as shown in FIG. 17.

37. The nucleic acid composition of any of the preceding claims, comprising
(a) a nucleic acid molecule encoding a chimeric antigen receptor (CAR) polypeptide,
(b) a nucleic acid molecule encoding an SHP1 inhibitor polypeptide, wherein said SHP1 inhibitor polypeptide comprises:
(i) a mutation (e.g., one or more deletions or substitutions) in the ITIM-binding region (e.g., an SH2 domain, e.g., the N-terminal SH2 domain) of an SHP1 polypeptide, and
(ii) a mutation (e.g., one or more deletions or substitutions) in a catalytic domain e.g., the phosphatase domain, of an SHP1 polypeptide, and
(c) a nucleic acid molecule encoding an SHP2 inhibitor polypeptide, wherein said SHP2 inhibitor polypeptide comprises:
(i) a mutation (e.g., one or more deletions or substitutions) in the ITIM-binding region (e.g., an SH2 domain, e.g., the N-terminal SH2 domain) of an SHP2 polypeptide, and
(ii) a mutation (e.g., one or more deletions or substitutions) in a catalytic domain e.g., the phosphatase domain, of an SHP2 polypeptide, optionally wherein:
the SHP1 inhibitor polypeptide comprises or consists of the amino acid sequence of SEQ ID NO: 41 or 42 (or an amino acid sequence substantially identical thereto, e.g., at least 90%, 95%, 97%, 98%, or 99% identical thereto), and/or
the SHP2 inhibitor polypeptide comprises or consists of the amino acid sequence of SEQ ID NO: 44 or 45 (or an amino acid sequence substantially identical thereto, e.g., at least 90%, 95%, 97%, 98%, or 99% identical thereto), optionally wherein:
the SHP1 inhibitor polypeptide comprises or consists of the amino acid sequence of SEQ ID NO: 41 or 42, and the SHP2 inhibitor polypeptide comprises or consists of the amino acid sequence of SEQ ID NO: 44 or 45, optionally wherein:
the SHP1 inhibitor polypeptide comprises or consists of the amino acid sequence of SEQ ID NO: 41 and the SHP2 inhibitor polypeptide comprises or consists of the amino acid sequence of SEQ ID NO: 44.

38. The nucleic acid composition of any of the preceding claims, wherein the CAR polypeptide and SHP inhibitor polypeptide are encoded by a single nucleic acid molecule in the same frame and as a single polypeptide chain.

39. The nucleic acid composition of any of the preceding claims, wherein said SHP inhibitor polypeptide is attached to the N-terminus of said CAR polypeptide or the C-terminus of said CAR polypeptide.

40. The nucleic acid composition of any of the preceding claims, wherein said SHP inhibitor polypeptide and CAR polypeptide are separated by one or more peptide cleavage sites, optionally wherein the peptide cleavage site is an auto-cleavage site or a substrate for an intracellular protease, optionally wherein the peptide cleavage site is a T2A or P2A site.

41. The nucleic acid composition of any of the preceding claims, wherein the nucleic acid molecule encoding the CAR polypeptide and the nucleic acid molecule encoding the SHP inhibitor polypeptide are separated by a nucleic acid sequence encoding T2A or P2A.

42. The nucleic acid composition of claim 37, wherein the nucleic acid molecule encoding the CAR polypeptide, the nucleic acid molecule encoding the SHP1 inhibitor polypeptide, and the nucleic acid molecule encoding the SHP2 inhibitor polypeptide are separated by a nucleic acid sequence encoding T2A or P2A.

43. The nucleic acid composition of any of claims 1-37, wherein said CAR polypeptide and said SHP inhibitor polypeptide are encoded by a single nucleic acid molecule and are not expressed as a single polypeptide.

44. The nucleic acid composition of any of claims 1-37, wherein the expression of said CAR polypeptide and said SHP inhibitor polypeptide is controlled by:
a common promoter, or
separate promoters.

45. The nucleic acid composition of any of claims 1-37, wherein the nucleic acid encoding said CAR polypeptide and the nucleic acid encoding said SHP inhibitor polypeptide are separated by an internal ribosomal entry site.

46. The nucleic acid composition of any of the preceding claims, wherein said composition consists of a single isolated nucleic acid.

47. The nucleic acid composition of any of the preceding claims, wherein the encoded CAR polypeptide comprises an antigen binding domain, a transmembrane domain, and an intracellular signaling domain.

48. The nucleic acid composition of claim 47, wherein the intracellular domain comprises a primary signaling domain, a costimulatory domain, or both of a primary signaling domain and a costimulatory domain.

49. The nucleic acid composition of claim 48, wherein the primary signaling domain comprises a functional signaling domain of one or more proteins selected from the group consisting of CD3 zeta, CD3 gamma, CD3 delta, CD3 epsilon, common FcR gamma (FCER1G), FcR beta (Fc Epsilon R1b), CD79a, CD79b, Fcgamma RIIa, DAP10, and DAP12, or a functional variant thereof.

50. The nucleic acid composition of claim 48 or 49 wherein the costimulatory domain comprises a functional domain of one or more proteins selected from the group consisting of CD27, CD28, 4-1BB (CD137), OX40, CD28-OX40, CD28-4-1BB, CD30, CD40, PD-1, ICOS, lymphocyte function-associated antigen-1 (LFA-1), CD2, CD7, LIGHT, NKG2C, B7-H3, a ligand that specifically binds with CD83, CD5, ICAM-1, GITR, BAFFR, HVEM (LIGHTR), SLAMF7, NKp80 (KLRF1), CD160, CD19, CD4, CD8alpha, CD8beta, IL2R beta, IL2R gamma, IL7R alpha, ITGA4, VLA1, CD49a, ITGA4, IA4, CD49D, ITGA6, VLA-6, CD49f, ITGAD, CD11d, ITGAE, CD103, ITGAL, CD11a, LFA-1, ITGAM, CD11b, ITGAX, CD11c, ITGB1, CD29, ITGB2, CD18, LFA-1, ITGB7, TNFR2, TRANCE/RANKL, DNAM1 (CD226), SLAMF4 (CD244, 2B4), CD84, CD96 (Tactile), CEACAM1, CRTAM, Ly9 (CD229), CD160 (BY55), PSGL1, CD100 (SEMA4D), CD69, SLAMF6 (NTB-A, Ly108), SLAM (SLAMF1, CD150, IPO-3), BLAME (SLAMF8), SELPLG (CD162), LTBR, LAT, GADS, SLP-76, PAG/Cbp, NKp44, NKp30, NKp46, and NKG2D, or a functional variant thereof.

51. The nucleic acid composition of any of claims 47-50, wherein the antigen binding domain binds a tumor antigen.

52. The nucleic acid composition of claim 51, wherein the tumor antigen is selected from the group consisting of: CD19; CD123; CD22; CD30; CD171; CS-1 (also referred to as CD2 subset 1, CRACC, SLAMF7, CD319, and 19A24); C-type lectin-like molecule-1 (CLL-1 or CLECL1); CD33; epidermal growth factor receptor variant III (EGFRvIII); ganglioside G2 (GD2); ganglioside GD3 (aNeu5Ac(2-8)aNeu5Ac(2-3)bDGalp(1-4)bDGlcp(1-1)Cer); TNF receptor family member B cell maturation (BCMA); Tn antigen ((Tn Ag) or (GalNAcα-Ser/Thr)); prostate-specific membrane antigen (PSMA); Receptor tyrosine kinase-like orphan receptor 1 (ROR1); Fms-Like Tyrosine Kinase 3 (FLT3); Tumor-associated glycoprotein 72 (TAG72); CD38; CD44v6; Carcinoembryonic antigen (CEA); Epithelial cell adhesion molecule (EPCAM); B7H3 (CD276); KIT (CD117); Interleukin-13 receptor subunit alpha-2 (IL-13Ra2 or CD213A2); Mesothelin; Interleukin 11 receptor alpha (IL-11Ra); prostate stem cell antigen (PSCA); Protease Serine 21 (Testisin or PRSS21); vascular endothelial growth factor receptor 2 (VEGFR2); Lewis(Y) antigen; CD24; Platelet-derived growth factor receptor beta (PDGFR-beta); Stage-specific embryonic antigen-4 (SSEA-4); CD20; Folate receptor alpha; Receptor tyrosine-protein kinase ERBB2 (Her2/neu); Mucin 1, cell surface associated (MUC1); epidermal growth factor receptor (EGFR); neural cell adhesion molecule (NCAM); Prostase; prostatic acid phosphatase (PAP); elongation factor 2 mutated (ELF2M); Ephrin B2; fibroblast activation protein alpha (FAP); insulin-like growth factor 1 receptor (IGF-I receptor), carbonic anhydrase IX (CAIX); Proteasome (Prosome, Macropain) Subunit, Beta Type, 9 (LMP2); glycoprotein 100 (gp100); oncogene fusion protein consisting of breakpoint cluster region (BCR) and Abelson murine leukemia viral oncogene homolog 1 (Abl) (bcr-abl); tyrosinase; ephrin type-A receptor 2 (EphA2); Fucosyl GM1; sialyl Lewis adhesion molecule (sLe); ganglioside GM3 (aNeu5Ac(2-3)bDGalp(1-4)bDGlcp(1-1)Cer); transglutaminase 5 (TGS5); high molecular weight-melanoma-associated antigen (HMWMAA); o-acetyl-GD2 ganglioside (OAcGD2); Folate receptor beta; tumor endothelial marker 1 (TEM1/CD248); tumor endothelial marker 7-related (TEM7R); claudin 6 (CLDN6); thyroid stimulating hormone receptor (TSHR); G protein-coupled receptor class C group 5, member D (GPRC5D); chromosome X open reading frame 61 (CXORF61); CD97; CD179a; anaplastic lymphoma kinase (ALK); Polysialic acid; placenta-specific 1 (PLAC1); hexasaccharide portion of globoH glycoceramide (GloboH); mammary gland differentiation antigen (NY-BR-1); uroplakin 2 (UPK2); Hepatitis A virus cellular receptor 1 (HAVCR1); adrenoceptor beta 3 (ADRB3); pannexin 3 (PANX3); G protein-coupled receptor 20 (GPR20); lymphocyte antigen 6 complex, locus K 9 (LY6K); Olfactory receptor 51E2 (OR51E2); TCR Gamma Alternate Reading Frame Protein (TARP); Wilms tumor protein (WT1); Cancer/testis antigen 1 (NY-ESO-1); Cancer/testis antigen 2 (LAGE-1a); Melanoma-associated antigen 1 (MAGE-A1); ETS translocation-variant gene 6, located on chromosome 12p (ETV6-AML); sperm protein 17 (SPA17); X Antigen Family, Member 1A (XAGE1); angiopoietin-binding cell surface receptor 2 (Tie 2); melanoma cancer testis antigen-1 (MAD-CT-1); melanoma cancer testis antigen-2 (MAD-CT-2); Fos-related antigen 1; tumor protein p53 (p53); p53 mutant; prostein; survivin; telomerase; prostate carcinoma tumor antigen-1 (PCTA-1 or Galectin 8), melanoma antigen recognized by T cells 1 (MelanA or MART1); Rat sarcoma (Ras) mutant; human Telomerase reverse transcriptase (hTERT); sarcoma translocation breakpoints; melanoma inhibitor of apoptosis (ML-IAP); ERG (transmembrane protease, serine 2 (TMPRSS2) ETS fusion gene); N-Acetyl glucosaminyl-transferase V (NA17); paired box protein Pax-3 (PAX3); Androgen receptor; Cyclin B1; v-myc avian myelocytomatosis viral oncogene neuroblastoma derived homolog (MYCN); Ras Homolog Family Member C (RhoC); Tyrosinase-related protein 2 (TRP-2); Cytochrome P450 1B1 (CYP1B1); CCCTC-Binding Factor (Zinc Finger Protein)-Like (BORIS or Brother of the Regulator of Imprinted Sites), Squamous Cell Carcinoma Antigen Recognized By T Cells 3 (SART3); Paired box protein Pax-5 (PAX5); proacrosin binding protein sp32 (OY-TES1); lymphocyte-specific protein tyrosine kinase (LCK); A kinase anchor protein 4 (AKAP-4); synovial sarcoma, X breakpoint 2 (SSX2); Receptor for Advanced Glycation Endproducts (RAGE-1); renal ubiquitous 1 (RU1); renal ubiquitous 2 (RU2); legumain; human papilloma virus E6 (HPV E6); human papilloma virus E7 (HPV E7); intestinal carboxyl esterase; heat shock protein 70-2 mutated (mut hsp70-2); CD79a; CD79b; CD72; Leukocyte-associated immunoglobulin-like receptor 1 (LAIR1); Fc fragment of IgA receptor (FCAR or CD89); Leukocyte immunoglobulin-like receptor subfamily A member 2 (LILRA2); CD300 molecule-like family member f (CD300LF); C-type lectin domain family 12 member A (CLEC12A); bone marrow stromal cell antigen 2 (BST2); EGF-like module-containing mucin-like hormone receptor-like 2 (EMR2); lymphocyte antigen 75 (LY75); Glypican-3 (GPC3); Fc receptor-like 5 (FCRL5); and immunoglobulin lambda-like polypeptide 1 (IGLL1).

53. The nucleic acid composition of claim 51, wherein the tumor antigen is selected from CD150, 5T4, ActRIIA, B7, BMCA, CA-125, CCNA1, CD123, CD126, CD138, CD14, CD148, CD15, CD19, CD20, CD200, CD21, CD22, CD23, CD24, CD25, CD26, CD261, CD262, CD30, CD33, CD362, CD37, CD38, CD4, CD40, CD40L, CD44, CD46, CD5, CD52, CD53, CD54, CD56, CD66a-d, CD74, CD8, CD80, CD92, CE7, CS-1, CSPG4, ED-B fibronectin, EGFR, EGFRvIII, EGP-2, EGP-4, EPHa2, ErbB2, ErbB3, ErbB4, FBP, GD2, GD3, HER1-HER2 in combination, HER2-HER3 in combination, HERV-K, HIV-1 envelope glycoprotein gp120, HIV-1 envelope glycoprotein gp41, HLA-DR, HM1.24, HMW-MAA, Her2, Her2/neu, IGF-1R, IL-11Ralpha, IL-13R-alpha2, IL-2, IL-22R-alpha, IL-6, IL-6R, Ia, Ii, L1-CAM, L1-cell adhesion molecule, Lewis Y, L1-CAM, MAGE A3, MAGE-A1, MART-1, MUC1, NKG2C ligands, NKG2D Ligands, NY-ESO-1, OEPHa2, PIGF, PSCA, PSMA, ROR1, T101, TAC, TAG72, TIM-3, TRAIL-R1, TRAIL-R1 (DR4), TRAIL-R2 (DR5), VEGF, VEGFR2, WT-1, a G-protein coupled receptor, alphafetoprotein (AFP), an angiogenesis factor, an exogenous cognate binding molecule (ExoCBM), oncogene product, anti-folate receptor, c-Met, carcinoembryonic antigen (CEA), cyclin (D1), ephrinB2, epithelial tumor antigen, estrogen receptor, fetal acethycholine e receptor, folate binding protein, gp100, hepatitis B surface antigen, kappa chain, kappa light chain, kdr, lambda chain, livin, melanoma-associated antigen, mesothelin, mouse double minute 2 homolog (MDM2), mucin 16 (MUC16), mutated p53, mutated ras, necrosis antigens, oncofetal antigen, ROR2, progesterone receptor, prostate specific antigen, tEGFR, tenascin, β2-Microglobulin, Fc Receptor-like 5 (FcRL5), or molecules expressed by HIV, HCV, HBV, or other pathogens.

54. The nucleic acid composition of claim 51, wherein the tumor antigen is a solid tumor antigen, e.g., mesothelin.

55. The nucleic acid composition of claim 51, wherein the tumor antigen is expressed in a solid tumor that also expresses an immune checkpoint inhibitor, e.g., PD-L1.

56. The nucleic acid composition of any of claims 47-55, wherein the antigen binding domain comprises an antibody, an antibody fragment, an scFv, a Fv, a Fab, a (Fab′)2, a single domain antibody (SDAB), a VH or VL domain, or a camelid VHH domain.

57. The nucleic acid composition of any of claims 47-56, wherein the transmembrane domain comprises a transmembrane domain of a protein selected from the group consisting of the alpha, beta or zeta chain of the T-cell receptor, CD28, CD3 epsilon, CD45, CD4, CD5, CD8, CD9, CD16, CD22, CD33, CD37, CD64, CD80, CD86, CD134, CD137, CD154, KIRDS2, OX40, CD2, CD27, LFA-1 (CD11a, CD18), ICOS (CD278), 4-1BB (CD137), GITR, CD40, BAFFR, HVEM (LIGHTR), SLAMF7, NKp80 (KLRF1), CD160, CD19, IL2R beta, IL2R gamma, IL7Rα, ITGA1, VLA1, CD49a, ITGA4, IA4, CD49D, ITGA6, VLA-6, CD49f, ITGAD, CD11d, ITGAE, CD103, ITGAL, CD11a, LFA-1, ITGAM, CD11b, ITGAX, CD11c, ITGB1, CD29, ITGB2, CD18, LFA-1, ITGB7, TNFR2, DNAM1 (CD226), SLAMF4 (CD244, 2B4), CD84, CD96 (Tactile), CEACAM1, CRTAM, Ly9 (CD229), CD160 (BY55), PSGL1, CD100 (SEMA4D), SLAMF6 (NTB-A, Ly108), SLAM (SLAMF1, CD150, IPO-3), BLAME (SLAMF8), SELPLG (CD162), LTBR, PAG/Cbp, NKp44, NKp30, NKp46, NKG2D, and NKG2C, or a functional variant thereof.

58. The nucleic acid composition of any of claims 47-57, wherein the antigen binding domain is connected to the transmembrane domain by a hinge region.

59. The nucleic acid composition of any of claims 47-58, which further encodes a leader sequence.

60. The nucleic acid composition of any of the preceding claims, which is DNA or RNA.

61. A vector comprising the nucleic acid composition of any one of claims 1-60, e.g., wherein the vector is selected from the group consisting of a DNA vector, an RNA vector, a plasmid, a lentivirus vector, adenoviral vector, or a retrovirus vector.

62. The vector of claim 61, further comprising a promoter, e.g., wherein the promoter is chosen from an EF-1 promoter, a CMV IE gene promoter, an EF-1α promoter, an ubiquitin C promoter, or a phosphoglycerate kinase (PGK) promoter.

63. The vector of claim 61 or 62, wherein the vector is an in vitro transcribed vector, or the vector further comprises a poly(A) tail or a 3′UTR.

64. A polypeptide comprising a CAR polypeptide and a SHP inhibitor polypeptide, e.g., with a peptide cleavage site disposed therebetween, wherein the SHP inhibitor polypeptide comprises:
(i) a mutation (e.g., one or more deletions or substitutions) in the ITIM-binding region (e.g., an SH2 domain, e.g., the N-terminal SH2 domain) of the SHP inhibitor polypeptide, and
(ii) a mutation (e.g., one or more deletions or substitutions) in a catalytic domain e.g., the phosphatase domain.

65. The polypeptide of claim 64, wherein the peptide cleavage site is a T2A or P2A site.

66. The polypeptide of claim 64 or 65, wherein the CAR polypeptide is a CAR polypeptide as recited in any of the preceding claims.

67. The polypeptide of any of claims 64-66 wherein the SHP inhibitor polypeptide is a SHP inhibitor polypeptide as recited in any of the preceding claims.

68. An immune effector cell (e.g., a population of immune effector cells), comprising
a nucleic acid composition of any of claims 1-60;
a vector of any one of claims 61-63; or
a polypeptide of any of claims 64-67.

69. An immune effector cell (e.g., a population of immune effector cells) comprising a CAR polypeptide and a SHP inhibitor polypeptide as recited in any of the preceding claims.

70. An immune effector cell (e.g., a population of immune effector cells) comprising
(a) a CAR polypeptide and
(b) a SHP inhibitor polypeptide, wherein said SHP inhibitor polypeptide comprises:
(i) a mutation (e.g., one or more deletions or substitutions) in the ITIM-binding region (e.g., an SH2 domain, e.g., the N-terminal SH2 domain) of the SHP inhibitor polypeptide, and
(ii) a mutation (e.g., one or more deletions or substitutions) in a catalytic domain e.g., the phosphatase domain.

71. The immune effector cell of any of claims 68-70, wherein the immune effector cell is a human T cell (e.g., CD8+ T cell or CD4+ T cell) or a human NK cell, optionally, wherein the T cell is diacylglycerol kinase (DGK) and/or Ikaros deficient.

72. The immune effector cell of any of claims 68-71, wherein the immune effector cell is derived from blood, cord blood, bone marrow, or iPSC.

73. The immune effector cell of any of claims 68-72, wherein the immune effector cell comprises an immune checkpoint inhibitor, e.g., a receptor.

74. The immune effector cell of claim 73, wherein the immune checkpoint inhibitor is chosen from PD-1, PD-L1, LAG-3, TIM3, B7-H1, CD160, P1H, 2B4, CEACAM (e.g., CEACAM-1, CEACAM-3, and/or CEACAM-5), TIGIT, CTLA-4, BTLA, or LAIR1.

75. The immune effector cell of claim 74, wherein the immune checkpoint inhibitor is PD-1.

76. A method of making a CAR-expressing immune effector cell (e.g., a population of CAR-expressing immune effector cells), comprising introducing the nucleic acid composition of any one of claims 1-60 or a vector of any of claims 61-63, into an immune effector cell, under conditions such that the CAR polypeptide is expressed.

77. The method of claim 76, further comprising:
(a) providing a population of immune effector cells (e.g., T cells or NK cells); and
(b) removing T regulatory cells from the population, thereby providing a population of T regulatory-depleted cells;
wherein steps (a) and (b) are performed prior to introducing the nucleic acid composition to the population, optionally wherein the T regulatory cells are removed from the cell population using an anti-CD25 antibody, or an anti-GITR antibody.

78. A method of providing anti-tumor immunity in a subject comprising administering to the subject an effective amount of the immune effector cell of any of claims 68-75, e.g., wherein the cell is an autologous T cell or an allogeneic T cell, or an autologous NK cell or an allogeneic NK cell.

79. A method of treating a subject having a disease (e.g., cancer) associated with expression of a tumor antigen, comprising administering to the subject an effective amount of an immune effector cell of any of claims 68-75, thereby treating the subject.

80. The method of claim 79, wherein the cancer cells comprise an immune checkpoint inhibitor, e.g., a ligand.

81. The method of claim 80, wherein the immune checkpoint inhibitor is chosen from PD-1, PD-L1, LAG-3, TIM3, B7-H1, CD160, P1H, 2B4, CEACAM (e.g., CEACAM-1, CEACAM-3, and/or CEACAM-5), TIGIT, CTLA-4, BTLA, or LAIR1, optionally wherein the immune checkpoint inhibitor is PD-L1.

82. The method of any of claims 78-81, said method further comprising administering an agent that increases the efficacy of the immune effector cell, thereby treating the subject.

83. The method of claim 82, wherein said agent is chosen from one or more of:
a protein phosphatase inhibitor;
a kinase inhibitor;
a cytokine;
an inhibitor of an immune inhibitory molecule; or
an agent that decreases the level or activity of a T_{REG} cell.

84. The method of any of claims 79-83, wherein the disease associated with expression of a tumor antigen is selected from the group consisting of a proliferative disease, a precancerous condition, a cancer, and a non-cancer related indication associated with expression of the tumor antigen.

85. The method of any of claims 79-84, wherein the disease associated with expression of a tumor antigen is a solid tumor.

86. The method of any of claims 79-85, wherein the cancer is selected from the group consisting of colon cancer, rectal cancer, renal-cell carcinoma, liver cancer, non-small cell carcinoma of the lung, cancer of the small intestine, cancer of the esophagus, melanoma, bone cancer, pancreatic cancer, skin cancer, cancer of the head or neck, cutaneous or intraocular malignant melanoma, uterine cancer, ovarian cancer, rectal cancer, cancer of the anal region, stomach cancer, testicular cancer, uterine cancer, carcinoma of the fallopian tubes, carcinoma of the endometrium, carcinoma of the cervix, carcinoma of the vagina, carcinoma of the vulva, Hodgkin's Disease, non-Hodgkin lymphoma, cancer of the endocrine system, cancer of the thyroid gland, cancer of the parathyroid gland, cancer of the adrenal gland, sarcoma of soft tissue, cancer of the urethra, cancer of the penis, solid tumors of childhood, cancer of the bladder, cancer of the kidney or ureter, carcinoma of the renal pelvis, neoplasm of the central nervous system (CNS), primary CNS lymphoma, tumor angiogenesis, spinal axis tumor, brain stem glioma, pituitary adenoma, Kaposi's sarcoma, epidermoid cancer, squamous cell cancer, T-cell lymphoma, environmentally induced cancers, combinations of said cancers, and metastatic lesions of said cancers.

87. The method of any of claims 79-85, wherein the cancer is a hematologic cancer chosen from one or more of chronic lymphocytic leukemia (CLL), acute leukemias, acute lymphoid leukemia (ALL), B-cell acute lymphoid leukemia (B-ALL), T-cell acute lymphoid leukemia (T-ALL), chronic myelogenous leukemia (CML), B cell prolymphocytic leukemia, blastic plasmacytoid dendritic cell neoplasm, Burkitt's lymphoma, diffuse large B cell lymphoma, follicular lymphoma, hairy cell leukemia, small cell- or a large cell-follicular lymphoma, malignant lymphoproliferative conditions, MALT lymphoma, mantle cell lymphoma, marginal zone lymphoma, multiple myeloma, myelodysplasia and myelodysplastic syndrome, non-Hodgkin's lymphoma, Hodgkin's lymphoma, plasmablastic lymphoma, plasmacytoid dendritic cell neoplasm, Waldenstrom macroglobulinemia, or pre-leukemia.

88. The nucleic acid composition of any of claims 1-60, the vector of any of claims 61-63, the polypeptide of any of claims 64-67, or the immune effector cell of any of claims 68-75, for use as a medicament.

89. The nucleic acid composition of any of claims 1-60, the vector of any of claims 61-63, the polypeptide of any of claims 64-67, or the immune effector cell of any of claims 68-75, for use in the treatment of a disease expressing a tumor antigen.

90. A composition comprising:
(a) a nucleic acid molecule encoding a chimeric antigen receptor (CAR) polypeptide and
(b) an SHP inhibitor, wherein the SHP inhibitor is chosen from:
(i) one or more components of a gene editing system targeting one or more sites within a gene encoding SHP (e.g., SHP1 or SHP2) or a regulatory element thereof, a nucleic acid molecule encoding the one or more components of the gene editing system, or a combination thereof, or
(2) an agent that has RNAi or antisense inhibition activity against SHP (e.g., SHP1 or SHP2), or a nucleic acid molecule encoding the agent.

91. The composition of claim 90, wherein the SHP inhibitor is one or more components of a gene editing system targeting one or more sites within a gene encoding SHP (e.g., SHP1 or SHP2) or a regulatory element thereof, a nucleic acid molecule encoding the one or more components of the gene editing system, or a combination thereof.

92. The composition of claim 91, wherein the gene editing system is chosen from a CRISPR/Cas9 system, a zinc finger nuclease system, a TALEN system, or a meganuclease system.

93. The composition of claim 92, wherein the gene editing system is a CRISPR/Cas9 system.

94. The composition of claim 93, wherein the SHP inhibitor comprises a guide RNA (gRNA) molecule targeting a gene encoding SHP (e.g., SHP1 or SHP2) or a regulatory element thereof, optionally wherein the SHP inhibitor comprises a gRNA molecule targeting an exon of the gene encoding SHP (e.g., SHP1 or SHP2).

95. The composition of claim 93 or 94, wherein the SHP inhibitor is an SHP2 inhibitor, wherein the SHP2 inhibitor comprises a gRNA molecule targeting any genomic location provided in column 4 of Table 19, e.g., wherein the SHP2 inhibitor comprises a gRNA molecule targeting any genomic target sequence provided in column 6 of Table 19, or a portion thereof.

96. The composition of any one of claims 93-95, wherein the SHP inhibitor is an SHP2 inhibitor, wherein the SHP2 inhibitor comprises a gRNA molecule comprising a tracr and a crRNA, wherein the crRNA comprises a targeting domain that is complementary with a target sequence of SHP2, optionally wherein:
(i) the targeting domain comprises any nucleotide sequence provided in column 5 of Table 19,
(ii) the targeting domain comprises or consists of 17, 18, 19, 20, 21, 22, 23, or 24 consecutive nucleic acids of any nucleotide sequence provided in column 5 of Table 19, optionally wherein: (1) the 17, 18, 19, 20, 21, 22, 23, or 24 consecutive nucleic acids of any nucleotide sequence provided in column 5 of Table 19 are the 17, 18, 19, 20, 21, 22, 23, or 24 consecutive nucleic acids disposed at the 3′ end of the recited nucleotide sequence provided in column 5 of Table 19, (2) the 17, 18, 19, 20, 21, 22, 23, or 24 consecutive nucleic acids of any nucleotide sequence provided in column 5 of Table 19 are the 17, 18, 19, 20, 21, 22, 23, or 24 consecutive nucleic acids disposed at the 5′ end of the recited nucleotide sequence provided in column 5 of Table 19, or (3) the 17, 18, 19, 20, 21, 22, 23, or 24 consecutive nucleic acids of any nucleotide sequence provided in column 5 of Table 19 do not comprise either the 5′ or 3′ nucleic acid of the recited nucleotide sequence provided in column 5 of Table 19.

97. The composition of claim 90, wherein the SHP inhibitor is an agent that has RNAi or antisense inhibition activity against SHP (e.g., SHP1 or SHP2), or a nucleic acid molecule encoding the agent.

98. The composition of claim 97, wherein the SHP inhibitor is an agent that mediates RNA interference, e.g., an siRNA or shRNA specific for a gene encoding SHP (e.g., SHP1 or SHP2), or a nucleic acid molecule encoding the siRNA or shRNA.

99. The composition of any one of claims 90-98, wherein the encoded CAR polypeptide comprises an antigen binding domain, a transmembrane domain, and an intracellular signaling domain.

100. The composition of claim 99, wherein the intracellular domain comprises a primary signaling domain, a costimulatory domain, or both of a primary signaling domain and a costimulatory domain.

101. The composition of claim 100, wherein the primary signaling domain comprises a functional signaling domain of one or more proteins selected from the group consisting of CD3 zeta, CD3 gamma, CD3 delta, CD3 epsilon, common FcR gamma (FCER1G), FcR beta (Fc Epsilon R1b), CD79a, CD79b, Fcgamma RIIa, DAP10, and DAP12, or a functional variant thereof.

102. The composition of claim 100 or 101 wherein the costimulatory domain comprises a functional domain of one or more proteins selected from the group consisting of CD27, CD28, 4-1BB (CD137), OX40, CD28-OX40, CD28-4-1BB, CD30, CD40, PD-1, ICOS, lymphocyte function-associated antigen-1 (LFA-1), CD2, CD7, LIGHT, NKG2C, B7-H3, a ligand that specifically binds with CD83, CD5, ICAM-1, GITR, BAFFR, HVEM (LIGHTR), SLAMF7, NKp80 (KLRF1), CD160, CD19, CD4, CD8alpha, CD8beta, IL2R beta, IL2R gamma, IL7R alpha, ITGA4, VLA1, CD49a, ITGA4, IA4, CD49D, ITGA6, VLA-6, CD49f, ITGAD, CD11d, ITGAE, CD103, ITGAL, CD11a, LFA-1, ITGAM, CD11b, ITGAX, CD11c, ITGB1, CD29, ITGB2, CD18, LFA-1, ITGB7, TNFR2, TRANCE/RANKL, DNAM1 (CD226), SLAMF4 (CD244, 2B4), CD84, CD96 (Tactile), CEACAM1, CRTAM, Ly9 (CD229), CD160 (BY55), PSGL1, CD100 (SEMA4D), CD69, SLAMF6 (NTB-A, Ly108), SLAM (SLAMF1, CD150, IPO-3), BLAME (SLAMF8), SELPLG (CD162), LTBR, LAT, GADS, SLP-76, PAG/Cbp, NKp44, NKp30, NKp46, and NKG2D, or a functional fragment thereof.

103. The composition of any of claims 99-102, wherein the antigen binding domain binds a tumor antigen.

104. The composition of claim 103, wherein the tumor antigen is selected from the group consisting of: CD19; CD123; CD22; CD30; CD171; CS-1 (also referred to as CD2 subset 1, CRACC, SLAMF7, CD319, and 19A24); C-type lectin-like molecule-1 (CLL-1 or CLECL1); CD33; epidermal growth factor receptor variant III (EGFRvIII); ganglioside G2 (GD2); ganglioside GD3 (aNeu5Ac(2-8)aNeu5Ac(2-3)bDGalp(1-4)bDGlcp(1-1)Cer); TNF receptor family member B cell maturation (BCMA); Tn antigen ((Tn Ag) or (GalNAcα-Ser/Thr)); prostate-specific membrane antigen (PSMA); Receptor tyrosine kinase-like orphan receptor 1 (ROR1); Fms-Like Tyrosine Kinase 3 (FLT3); Tumor-associated glycoprotein 72 (TAG72); CD38; CD44v6; Carcinoembryonic antigen (CEA); Epithelial cell adhesion molecule (EPCAM); B7H3 (CD276); KIT (CD117); Interleukin-13 receptor subunit alpha-2 (IL-13Ra2 or CD213A2); Mesothelin; Interleukin 11 receptor alpha (IL-11Ra); prostate stem cell antigen (PSCA); Protease Serine 21 (Testisin or PRSS21); vascular endothelial growth factor receptor 2 (VEGFR2); Lewis(Y) antigen; CD24; Platelet-derived growth factor receptor beta (PDGFR-beta); Stage-specific embryonic antigen-4 (SSEA-4); CD20; Folate receptor alpha; Receptor tyrosine-protein kinase ERBB2 (Her2/neu); Mucin 1, cell surface associated (MUC1); epidermal growth factor receptor (EGFR); neural cell adhesion molecule (NCAM); Prostase; prostatic acid phosphatase (PAP); elongation factor 2 mutated (ELF2M); Ephrin B2; fibroblast activation protein alpha (FAP); insulin-like growth factor 1 receptor (IGF-I receptor), carbonic anhydrase IX (CAIX); Proteasome (Prosome, Macropain) Subunit, Beta Type, 9 (LMP2); glycoprotein 100 (gp100); oncogene fusion protein consisting of breakpoint cluster region (BCR) and Abelson murine leukemia viral oncogene homolog 1 (Abl) (bcr-abl); tyrosinase; ephrin type-A receptor 2 (EphA2); Fucosyl GM1; sialyl Lewis adhesion molecule (sLe); ganglioside GM3 (aNeu5Ac(2-3)bDGalp(1-4)bDGlcp(1-1)Cer); transglutaminase 5 (TGS5); high molecular weight-melanoma-associated antigen (HMWMAA); o-acetyl-GD2 ganglioside (OAcGD2); Folate receptor beta; tumor endothelial marker 1 (TEM1/CD248); tumor endothelial marker 7-related (TEM7R); claudin 6 (CLDN6); thyroid stimulating hormone receptor (TSHR); G protein-coupled receptor class C group 5, member D (GPRC5D); chromosome X open reading frame 61 (CXORF61); CD97; CD179a; anaplastic lymphoma kinase (ALK); Polysialic acid; placenta-specific 1 (PLAC1); hexasaccharide portion of globoH glycoceramide (GloboH); mammary gland differentiation antigen (NY-BR-1); uroplakin 2 (UPK2); Hepatitis A virus cellular receptor 1 (HAVCR1); adrenoceptor beta 3 (ADRB3); pannexin 3 (PANX3); G protein-coupled receptor 20 (GPR20); lymphocyte antigen 6 complex, locus K 9 (LY6K); Olfactory receptor 51E2 (OR51E2); TCR Gamma Alternate Reading Frame Protein (TARP); Wilms tumor protein (WT1); Cancer/testis antigen 1 (NY-ESO-1); Cancer/testis antigen 2 (LAGE-1a); Melanoma-associated antigen 1 (MAGE-A1); ETS translocation-variant gene 6, located on chromosome 12p (ETV6-AML); sperm protein 17 (SPA17); X Antigen Family, Member 1A (XAGE1); angiopoietin-binding cell surface receptor 2 (Tie 2); melanoma cancer testis antigen-1 (MAD-CT-1); melanoma cancer testis antigen-2 (MAD-CT-2); Fos-related antigen 1; tumor protein p53 (p53); p53 mutant; prostein; survivin; telomerase; prostate carcinoma tumor antigen-1 (PCTA-1 or Galectin 8), melanoma antigen recognized by T cells 1 (MelanA or MART1); Rat sarcoma (Ras) mutant; human Telomerase reverse transcriptase (hTERT); sarcoma translocation breakpoints; melanoma inhibitor of apoptosis (ML-IAP); ERG (transmembrane protease, serine 2 (TMPRSS2) ETS fusion gene); N-Acetyl glucosaminyl-transferase V (NA17); paired box protein Pax-3 (PAX3); Androgen receptor; Cyclin B1; v-myc avian myelocytomatosis viral oncogene neuroblastoma derived homolog (MYCN); Ras Homolog Family Member C (RhoC); Tyrosinase-related protein 2 (TRP-2); Cytochrome P450 1B1 (CYP1B1); CCCTC-Binding Factor (Zinc Finger Protein)-Like (BORIS or Brother of the Regulator of Imprinted Sites), Squamous Cell Carcinoma Antigen Recognized By T Cells 3 (SART3); Paired box protein Pax-5 (PAX5); proacrosin binding protein sp32 (OY-TES1); lymphocyte-specific protein tyrosine kinase (LCK); A kinase anchor protein 4 (AKAP-4); synovial sarcoma, X breakpoint 2 (SSX2); Receptor for Advanced Glycation Endproducts (RAGE-1); renal ubiquitous 1 (RU1); renal ubiquitous 2 (RU2); legumain; human papilloma virus E6 (HPV E6); human papilloma virus E7 (HPV E7); intestinal carboxyl esterase; heat shock protein 70-2 mutated (mut hsp70-2); CD79a; CD79b; CD72; Leukocyte-associated immunoglobulin-like receptor 1 (LAIR1); Fc fragment of IgA receptor (FCAR or CD89); Leukocyte immunoglobulin-like receptor subfamily A member 2 (LILRA2); CD300 molecule-like family member f (CD300LF); C-type lectin domain family 12 member A (CLEC12A); bone marrow stromal cell antigen 2 (BST2); EGF-like module-containing mucin-like hormone receptor-like 2 (EMR2); lymphocyte antigen 75 (LY75); Glypican-3 (GPC3); Fc receptor-like 5 (FCRL5); and immunoglobulin lambda-like polypeptide 1 (IGLL1).

105. The composition of claim 103, wherein the tumor antigen is selected from CD150, 5T4, ActRIIA, B7, BMCA, CA-125, CCNA1, CD123, CD126, CD138, CD14, CD148, CD15, CD19, CD20, CD200, CD21, CD22, CD23, CD24, CD25, CD26, CD261, CD262, CD30, CD33, CD362, CD37, CD38, CD4, CD40, CD40L, CD44, CD46, CD5, CD52, CD53, CD54, CD56, CD66a-d, CD74, CD8, CD80, CD92, CE7, CS-1, CSPG4, ED-B fibronectin, EGFR, EGFRvIII, EGP-2, EGP-4, EPHa2, ErbB2, ErbB3, ErbB4, FBP, GD2, GD3, HER1-HER2 in combination, HER2-HER3 in combination, HERV-K, HIV-1 envelope glycoprotein gp120, HIV-1 envelope glycoprotein gp41, HLA-DR, HM1.24, HMW-MAA, Her2, Her2/neu, IGF-1R, IL-11Ralpha, IL-13R-alpha2, IL-2, IL-22R-alpha, IL-6, IL-6R, Ia, Ii, L1-CAM, L1-cell adhesion molecule, Lewis Y, L1-CAM, MAGE A3, MAGE-A1, MART-1, MUC1, NKG2C ligands, NKG2D Ligands, NY-ESO-1, OEPHa2, PIGF, PSCA, PSMA, ROR1, T101, TAC, TAG72, TIM-3, TRAIL-R1, TRAIL-R1 (DR4), TRAIL-R2 (DR5), VEGF, VEGFR2, WT-1, a G-protein coupled receptor, alphafetoprotein (AFP), an angiogenesis factor, an exogenous cognate binding molecule (ExoCBM), oncogene product, anti-folate receptor, c-Met, carcinoembryonic antigen (CEA), cyclin (D1), ephrinB2, epithelial tumor antigen, estrogen receptor, fetal acethycholine e receptor, folate binding protein, gp100, hepatitis B surface antigen, kappa chain, kappa light chain, kdr, lambda chain, livin, melanoma-associated antigen, mesothelin, mouse double minute 2 homolog (MDM2), mucin 16 (MUC16), mutated p53, mutated ras, necrosis antigens, oncofetal antigen, ROR2, progesterone receptor, prostate specific antigen, tEGFR, tenascin, β2-Microglobulin, Fc Receptor-like 5 (FcRL5), or molecules expressed by HIV, HCV, HBV, or other pathogens.

106. The composition of claim 103, wherein the tumor antigen is a solid tumor antigen, e.g., mesothelin.

107. The composition of claim 103, wherein the tumor antigen is expressed in a solid tumor that also expresses an immune checkpoint inhibitor, e.g., PD-L1.

108. The composition of any one of claims 99-107, wherein the antigen binding domain comprises an antibody, an antibody fragment, an scFv, a Fv, a Fab, a (Fab′)2, a single domain antibody (SDAB), a VH or VL domain, or a camelid VHH domain.

109. The composition of any one of claims 99-108, wherein the transmembrane domain comprises a transmembrane domain of a protein selected from the group consisting of the alpha, beta or zeta chain of the T-cell receptor, CD28, CD3 epsilon, CD45, CD4, CD5, CD8, CD9, CD16, CD22, CD33, CD37, CD64, CD80, CD86, CD134, CD137, CD154, KIRDS2, OX40, CD2, CD27, LFA-1 (CD11a, CD18), ICOS (CD278), 4-1BB (CD137), GITR, CD40, BAFFR, HVEM (LIGHTR), SLAMF7, NKp80 (KLRF1), CD160, CD19, IL2R beta, IL2R gamma, IL7Rα, ITGA1, VLA1, CD49a, ITGA4, IA4, CD49D, ITGA6, VLA-6, CD49f, ITGAD, CD11d, ITGAE, CD103, ITGAL, CD11a, LFA-1, ITGAM, CD11b, ITGAX, CD11c, ITGB1, CD29, ITGB2, CD18, LFA-1, ITGB7, TNFR2, DNAM1 (CD226), SLAMF4 (CD244, 2B4), CD84, CD96 (Tactile), CEACAM1, CRTAM, Ly9 (CD229), CD160 (BY55), PSGL1, CD100 (SEMA4D), SLAMF6 (NTB-A, Ly108), SLAM (SLAMF1, CD150, IPO-3), BLAME (SLAMF8), SELPLG (CD162), LTBR, PAG/Cbp, NKp44, NKp30, NKp46, NKG2D, and NKG2C, or a functional variant thereof.

110. The composition of any one of claims 99-109, wherein the antigen binding domain is connected to the transmembrane domain by a hinge region.

111. The composition of any one of claims 99-110, which further encodes a leader sequence.

112. The composition of any one of claims 90-111, wherein the composition comprises:
(a) a nucleic acid molecule encoding a chimeric antigen receptor (CAR) polypeptide,
(b) an SHP1 inhibitor, wherein the SHP1 inhibitor is chosen from:
(i) one or more components of a gene editing system targeting one or more sites within a gene encoding SHP1 or a regulatory element thereof, a nucleic acid molecule encoding the one or more components of the gene editing system, or a combination thereof, or
(2) an agent that has RNAi or antisense inhibition activity against SHP1, or a nucleic acid molecule encoding the agent, and
(c) an SHP2 inhibitor, wherein the SHP2 inhibitor is chosen from:
(i) one or more components of a gene editing system targeting one or more sites within a gene encoding SHP2 or a regulatory element thereof, a nucleic acid molecule encoding the one or more components of the gene editing system, or a combination thereof, or
(2) an agent that has RNAi or antisense inhibition activity against SHP2, or a nucleic acid molecule encoding the agent.

113. The composition of any one of claims 90-112, wherein the composition is DNA or RNA.

114. The composition of any one of claims 90-113, wherein the SHP inhibitor comprises:
(i) a nucleic acid molecule encoding the one or more components of the gene editing system targeting one or more sites within a gene encoding SHP (e.g., SHP1 or SHP2) or a regulatory element thereof, or
(ii) a nucleic acid molecule encoding the agent having RNAi or antisense inhibition activity against SHP (e.g., SHP1 or SHP2), optionally wherein:
the nucleic acid molecule encoding the CAR polypeptide, the nucleic acid molecule encoding the one or more components of the gene editing system, and the nucleic acid molecule encoding the agent having RNAi or antisense inhibition activity are disposed on:
a single nucleic acid molecule, or
separate nucleic acid molecules.

115. A vector comprising the composition of claim 113 or 114.

116. A cell (e.g., a population of immune effector cells), comprising:
the composition of any one of claims 90-114, or
the vector of claim 115.

117. The cell of claim 116, wherein the cell is chosen from a human T cell (e.g., CD8+ T cell or CD4+ T cell) or a human NK cell.

118. A method of making a CAR-expressing cell (e.g., a population of CAR-expressing immune effector cells), comprising culturing the cell of claim 116 or 117, under conditions such that the CAR polypeptide is expressed.

119. A method of providing anti-tumor immunity in a subject comprising administering to the subject an effective amount of the cell of claim 116 or 117, e.g., wherein the cell is an autologous T cell or an allogeneic T cell, or an autologous NK cell or an allogeneic NK cell.

120. A method of treating cancer in a subject in need thereof, comprising administering to the subject an effective amount of the cell of claim 116 or 117, thereby treating the subject.

121. The method of claim 120, wherein the cancer is selected from the group consisting of colon cancer, rectal cancer, renal-cell carcinoma, liver cancer, non-small cell carcinoma of the lung, cancer of the small intestine, cancer of the esophagus, melanoma, bone cancer, pancreatic cancer, skin cancer, cancer of the head or neck, cutaneous or intraocular malignant melanoma, uterine cancer, ovarian cancer, rectal cancer, cancer of the anal region, stomach cancer, testicular cancer, uterine cancer, carcinoma of the fallopian tubes, carcinoma of the endometrium, carcinoma of the cervix, carcinoma of the vagina, carcinoma of the vulva, Hodgkin's Disease, non-Hodgkin lymphoma, cancer of the endocrine system, cancer of the thyroid gland, cancer of the parathyroid gland, cancer of the adrenal gland, sarcoma of soft tissue, cancer of the urethra, cancer of the penis, solid tumors of childhood, cancer of the bladder, cancer of the kidney or ureter, carcinoma of the renal pelvis, neoplasm of the central nervous system (CNS), primary CNS lymphoma, tumor angiogenesis, spinal axis tumor, brain stem glioma, pituitary adenoma, Kaposi's sarcoma, epidermoid cancer, squamous cell cancer, T-cell lymphoma, environmentally induced cancers, combinations of said cancers, and metastatic lesions of said cancers.

122. The method of claim 120, wherein the cancer is a hematologic cancer chosen from one or more of chronic lymphocytic leukemia (CLL), acute leukemias, acute lymphoid leukemia (ALL), B-cell acute lymphoid leukemia (B-ALL), T-cell acute lymphoid leukemia (T-ALL), chronic myelogenous leukemia (CML), B cell prolymphocytic leukemia, blastic plasmacytoid dendritic cell neoplasm, Burkitt's lymphoma, diffuse large B cell lymphoma, follicular lymphoma, hairy cell leukemia, small cell- or a large cell-follicular lymphoma, malignant lymphoproliferative conditions, MALT lymphoma, mantle cell lymphoma, marginal zone lymphoma, multiple myeloma, myelodysplasia and myelodysplastic syndrome, non-Hodgkin's lymphoma, Hodgkin's lymphoma, plasmablastic lymphoma, plasmacytoid dendritic cell neoplasm, Waldenstrom macroglobulinemia, or pre-leukemia.

The application's sequence listing, which the Patent Office published only in electronic form, follows.

SEQUENCE LISTING (3449 sequences)

SEQ ID NO: 1 - protein, 595 aa, Homo sapiens
MVRWFHRDLSGLDAETLLKGRGVHGSFLARPSRKNQGDFSLSVRVGDQVTHIRIQNSGDFYDLYGGEKFATLTELVEYYTQQQGVLQDRDGTIIHLKYPLNCSDPTSERWYHGHMSGGQAETLLQAKGEPWTFLVRESLSQPGDFVLSVLSDQPKAGPGSPLRVTHIKVMCEGGRYTVGGLETFDSLTDLVEHFKKTGIEEASGAFVYLRQPYYATRVNAADIENRVLELNKKQESEDTAKAGFWEEFESLQKQEVKNLHQRLEGQRPENKGKNRYKNILPFDHSRVILQGRDSNIPGSDYINANYIKNQLLGPDENAKTYIASQGCLEATVNDFWQMAWQENSRVIVMTTREVEKGRNKCVPYWPEVGMQRAYGPYSVTNCGEHDTTEYKLRTLQVSPLDNGDLIREIWHYQYLSWPDHGVPSEPGGVLSFLDQINQRQESLPHAGPIIVHCSAGIGRTGTIIVIDMLMENISTKGLDCDIDIQKTIQMVRAQRSGMVQTEAQYKFIYVAIAQFIETTKKKLEVLQSQKGQESEYGNITYPPAMKNAHAKASRTSSKHKEDVYENLHTKNKREEKVKKQRSADKEKSKGSLKRK

SEQ ID NO: 2 - protein, 597 aa, Homo sapiens
MTSRRWFHPNITGVEAENLLLTRGVDGSFLARPSKSNPGDFTLSVRRNGAVTHIKIQNTGDYYDLYGGEKFATLAELVQYYMEHHGQLKEKNGDVIELKYPLNCADPTSERWFHGHLSGKEAEKLLTEKGKHGSFLVRESQSHPGDFVLSVRTGDDKGESNDGKSKVTHVMIRCQELKYDVGGGERFDSLTDLVEHYKKNPMVETLGTVLQLKQPLNTTRINAAEIESRVRELSKLAETTDKVKQGFWEEFETLQQQECKLLYSRKEGQRQENKNKNRYKNILPFDHTRVVLHDGDPNEPVSDYINANIIMPEFETKCNNSKPKKSYIATQGCLQNTVNDFWRMVFQENSRVIVMTTKEVERGKSKCVKYWPDEYALKEYGVMRVRNVKESAAHDYTLRELKLSKVGQALLQGNTERTVWQYHFRTWPDHGVPSDPGGVLDFLEEVHHKQESIMDAGPVVVHCSAGIGRTGTFIVIDILIDIIREKGVDCDIDVPKTIQMVRSQRSGMVQTEAQYRFIYMAVQHYIETLQRRIEEEQKSKRKGHEYTNIKYSLADQTSGDQSPLPPCTPTPPCAEMREDSARVYENVGLMQQQKSFR

SEQ ID NO: 3 - protein, 100 aa, Unknown
  source: /note="Description of Unknown: SHP-1 sequence"
  MOD_RES (30)..(30): Any amino acid
MVRWFHRDLSGLDAETLLKGRGVHGSFLAXPSRKNQGDFSLSVRVGDQVTHIRIQNSGDFYDLYGGEKFATLTELVEYYTQQQGVLQDRDGTIIHLKYPL

SEQ ID NO: 4 - protein, 102 aa, Unknown
  source: /note="Description of Unknown: SHP-2 sequence"
  MOD_RES (32)..(32): Any amino acid
MTSRRWFHPNITGVEAENLLLTRGVDGSFLAXPSKSNPGDFTLSVRRNGAVTHIKIQNTGDYYDLYGGEKFATLAELVQYYMEHHGQLKEKNGDVIELKYPL

SEQ ID NO: 5 - protein, 41 aa, Artificial Sequence
  source: /note="Description of Artificial Sequence: Synthetic polypeptide"
RSKRSRLLHSDYMNMTPRRPGPTRKHYQPYAPPRDFAAYRS

SEQ ID NO: 6 - DNA, 123 bp, Artificial Sequence
  source: /note="Description of Artificial Sequence: Synthetic polynucleotide"
aggagtaagaggagcaggctcctgcacagtgactacatgaacatgactccccgccgccccgggcccacccgcaagcattaccagccctatgccccaccacgcgacttcgcagcctatcgctcc

SEQ ID NO: 7 - DNA, 123 bp, Artificial Sequence
  source: /note="Description of Artificial Sequence: Synthetic polynucleotide"
aggagtaagaggagcaggctcctgcacagtgactacatgttcatgactccccgccgccccgggcccacccgcaagcattaccagccctatgccccaccacgcgacttcgcagcctatcgctcc

SEQ ID NO: 8 - DNA, 123 bp, Artificial Sequence
  source: /note="Description of Artificial Sequence: Synthetic polynucleotide"
aggagtaagaggagcaggctcctgcacagtgacttcatgaacatgactccccgccgccccgggcccacccgcaagcattaccagccctatgccccaccacgcgacttcgcagcctatcgctcc

SEQ ID NO: 9 - DNA, 123 bp, Artificial Sequence
  source: /note="Description of Artificial Sequence: Synthetic polynucleotide"
aggagtaagaggagcaggctcctgcacagtgacttcatgttcatgactccccgccgccccgggcccacccgcaagcattaccagccctatgccccaccacgcgacttcgcagcctatcgctcc

SEQ ID NO: 10 - protein, 10 aa, Artificial Sequence
  source: /note="Description of Artificial Sequence: Synthetic peptide"
GGGGSGGGGS

SEQ ID NO: 11 - DNA, 30 bp, Artificial Sequence
  source: /note="Description of Artificial Sequence: Synthetic oligonucleotide"
ggtggcggaggttctggaggtggaggttcc

SEQ ID NO: 12 - protein, 24 aa, Artificial Sequence
  source: /note="Description of Artificial Sequence: Synthetic peptide"
IYIWAPLAGTCGVLLLSLVITLYC

SEQ ID NO: 13 - DNA, 72 bp, Artificial Sequence
  source: /note="Description of Artificial Sequence: Synthetic oligonucleotide"
atctacatctgggcgcccttggccgggacttgtggggtccttctcctgtcactggttatcaccctttactgc

SEQ ID NO: 14 - protein, 42 aa, Artificial Sequence
  source: /note="Description of Artificial Sequence: Synthetic polypeptide"
KRGRKKLLYIFKQPFMRPVQTTQEEDGCSCRFPEEEEGGCEL

SEQ ID NO: 15 - DNA, 126 bp, Artificial Sequence
  source: /note="Description of Artificial Sequence: Synthetic polynucleotide"
aaacggggcagaaagaaactcctgtatatattcaaacaaccatttatgagaccagtacaaactactcaagaggaagatggctgtagctgccgatttccagaagaagaagaaggaggatgtgaactg

SEQ ID NO: 16 - protein, 48 aa, Artificial Sequence
  source: /note="Description of Artificial Sequence: Synthetic polypeptide"
QRRKYRSNKGESPVEPAEPCRYSCPREEEGSTIPIQEDYRKPEPACSP

SEQ ID NO: 17 - DNA, 123 bp, Artificial Sequence; identical to SEQ ID NO: 6
  source: /note="Description of Artificial Sequence: Synthetic polynucleotide"

SEQ ID NO: 18 - protein, 112 aa, Artificial Sequence
  source: /note="Description of Artificial Sequence: Synthetic polypeptide"
RVKFSRSADAPAYKQGQNQLYNELNLGRREEYDVLDKRRGRDPEMGGKPRRKNPQEGLYNELQKDKMAEAYSEIGMKGERRRGKGHDGLYQGLSTATKDTYDALHMQALPPR

SEQ ID NO: 19 - DNA, 336 bp, Artificial Sequence
  source: /note="Description of Artificial Sequence: Synthetic polynucleotide"
agagtgaagttcagcaggagcgcagacgcccccgcgtacaagcagggccagaaccagctctataacgagctcaatctaggacgaagagaggagtacgatgttttggacaagagacgtggccgggaccctgagatggggggaaagccgagaaggaagaaccctcaggaaggcctgtacaatgaactgcagaaagataagatggcggaggcctacagtgagattgggatgaaaggcgagcgccggaggggcaaggggcacgatggcctttaccagggtctcagtacagccaccaaggacacctacgacgcccttcacatgcaggccctgccccctcgc

SEQ ID NO: 20 - protein, 112 aa, Artificial Sequence
  source: /note="Description of Artificial Sequence: Synthetic polypeptide"
RVKFSRSADAPAYQQGQNQLYNELNLGRREEYDVLDKRRGRDPEMGGKPRRKNPQEGLYNELQKDKMAEAYSEIGMKGERRRGKGHDGLYQGLSTATKDTYDALHMQALPPR

SEQ ID NO: 21 - DNA, 336 bp, Artificial Sequence
  source: /note="Description of Artificial Sequence: Synthetic polynucleotide"
agagtgaagttcagcaggagcgcagacgcccccgcgtaccagcagggccagaaccagctctataacgagctcaatctaggacgaagagaggagtacgatgttttggacaagagacgtggccgggaccctgagatggggggaaagccgagaaggaagaaccctcaggaaggcctgtacaatgaactgcagaaagataagatggcggaggcctacagtgagattgggatgaaaggcgagcgccggaggggcaaggggcacgatggcctttaccagggtctcagtacagccaccaaggacacctacgacgcccttcacatgcaggccctgccccctcgc

SEQ ID NO: 22 - protein, 5 aa, Artificial Sequence
  source: /note="Description of Artificial Sequence: Synthetic peptide"
GGGGS

SEQ ID NO: 23 - DNA, 30 bp, Artificial Sequence; identical to SEQ ID NO: 11
  source: /note="Description of Artificial Sequence: Synthetic oligonucleotide"

SEQ ID NO: 24 - protein, 150 aa, Artificial Sequence [sequence omitted]

SEQ ID NO: 25 - DNA, 450 bp, Artificial Sequence
  source: /note="Description of Artificial Sequence: Synthetic polynucleotide"
cccggatggtttctggactctccggatcgcccgtggaatcccccaaccttctcaccggcactcttggttgtgactgagggcgataatgcgaccttcacgtgctcgttctccaacacctccgaatcattcgtgctgaactggtaccgcatgagcccgtcaaaccagaccgacaagctcgccgcgtttccggaagatcggtcgcaaccgggacaggattgtcggttccgcgtgactcaactgccgaatggcagagacttccacatgagcgtggtccgcgctaggcgaaacgactccgggacctacctgtgcggagccatctcgctggcgcctaaggcccaaatcaaagagagcttgagggccgaactgagagtgaccgagcgcagagctgaggtgccaactgcacatccatccccatcgcctcggcctgcggggcagtttcagaccctggtc

SEQ ID NO: 26 - protein, 394 aa, Artificial Sequence
  source: /note="Description of Artificial Sequence: Synthetic polypeptide"
MALPVTALLLPLALLLHAARPPGWFLDSPDRPWNPPTFSPALLVVTEGDNATFTCSFSNTSESFVLNWYRMSPSNQTDKLAAFPEDRSQPGQDCRFRVTQLPNGRDFHMSVVRARRNDSGTYLCGAISLAPKAQIKESLRAELRVTERRAEVPTAHPSPSPRPAGQFQTLVTTTPAPRPPTPAPTIASQPLSLRPEACRPAAGGAVHTRGLDFACDIYIWAPLAGTCGVLLLSLVITLYCKRGRKKLLYIFKQPFMRPVQTTQEEDGCSCRFPEEEEGGCELRVKFSRSADAPAYKQGQNQLYNELNLGRREEYDVLDKRRGRDPEMGGKPRRKNPQEGLYNELQKDKMAEAYSEIGMKGERRRGKGHDGLYQGLSTATKDTYDALHMQALPPR

SEQ ID NO: 27 - DNA, 1182 bp, Artificial Sequence
  source: /note="Description of Artificial Sequence: Synthetic polynucleotide"
atggccctccctgtcactgccctgcttctccccctcgcactcctgctccacgccgctagaccacccggatggtttctggactctccggatcgcccgtggaatcccccaaccttctcaccggcactcttggttgtgactgagggcgataatgcgaccttcacgtgctcgttctccaacacctccgaatcattcgtgctgaactggtaccgcatgagcccgtcaaaccagaccgacaagctcgccgcgtttccggaagatcggtcgcaaccgggacaggattgtcggttccgcgtgactcaactgccgaatggcagagacttccacatgagcgtggtccgcgctaggcgaaacgactccgggacctacctgtgcggagccatctcgctggcgcctaaggcccaaatcaaagagagcttgagggccgaactgagagtgaccgagcgcagagctgaggtgccaactgcacatccatccccatcgcctcggcctgcggggcagtttcagaccctggtcacgaccactccggcgccgcgcccaccgactccggccccaactatcgcgagccagcccctgtcgctgaggccggaagcatgccgccctgccgccggaggtgctgtgcatacccggggattggacttcgcatgcgacatctacatttgggctcctctcgccggaacttgtggcgtgctccttctgtccctggtcatcaccctgtactgcaagcggggtcggaaaaagcttctgtacattttcaagcagcccttcatgaggcccgtgcaaaccacccaggaggaggacggttgctcctgccggttccccgaagaggaagaaggaggttgcgagctgcgcgtgaagttctcccggagcgccgacgcccccgcctataagcagggccagaaccagctgtacaacgaactgaacctgggacggcgggaagagtacgatgtgctggacaagcggcgcggccgggaccccgaaatgggcgggaagcctagaagaaagaaccctcaggaaggcctgtataacgagctgcagaaggacaagatggccgaggcctactccgaaattgggatgaagggagagcggcggaggggaaaggggcacgacggcctgtaccaaggactgtccaccgccaccaaggacacatacgatgccctgcacatgcaggcccttccccctcgc

SEQ ID NO: 28 - protein, 40 aa, Artificial Sequence
  source: /note="Description of Artificial Sequence: Synthetic polypeptide"
  MISC_FEATURE (1)..(40): /note="This sequence may encompass 1-10 'Gly Gly Gly Ser' repeating units"
  source: /note="See specification as filed for detailed description of substitutions and preferred embodiments"
GGGSGGGSGGGSGGGSGGGSGGGSGGGSGGGSGGGSGGGS

SEQ ID NO: 29 - protein, 20 aa, Artificial Sequence
  source: /note="Description of Artificial Sequence: Synthetic peptide"
GGGGSGGGGSGGGGSGGGGS

SEQ ID NO: 30 - protein, 15 aa, Artificial Sequence
  source: /note="Description of Artificial Sequence: Synthetic peptide"
GGGGSGGGGSGGGGS

SEQ ID NO: 31 - protein, 4 aa, Artificial Sequence
  source: /note="Description of Artificial Sequence: Synthetic peptide"
GGGS

SEQ ID NO: 32 - DNA, 2000 bp, Artificial Sequence
  source: /note="Description of Artificial Sequence: Synthetic polynucleotide"
  misc_feature (1)..(2000): /note="This sequence may encompass 50-2000 nucleotides"
  source: /note="See specification as filed for detailed description of substitutions and preferred embodiments"
aaaaaaaaaaaaaaaaaaaaaaaaaaaaaaaaaaaaaaaaaaaaaaaaaaaaaaaaaaaaaaaaaaaaaaaaaaaaaaaaaaaaaaaaaaaaaaaaaaaaaaaaaaaaaaaaaaaaaaaaaaaaaaaaaaaaaaaaaaaaaaaaaaaaaaaaaaaaaaaaaaaaaaaaaaaaaaaaaaaaaaaaaaaaaaaaaaaaaaaaaaaaaaaaaaaaaaaaaaaaaaaaaaaaaaaaaaaaaaaaaaaaaaaaaaaaaaaaaaaaaaaaaaaaaaaaaaaaaaaaaaaaaaaaaaaaaaaaaaaaaaaaaaaaaaaaaaaaaaaaaaaaaaaaaaaaaaaaaaaaaaaaaaaaaaaaaaaaaaaaaaaaaaaaaaaaaaaaaaaaaaaaaaaaaaaaaaaaaaaaaaaaaaaaaaaaaaaaaaaaaaaaaaaaaaaaaaaaaaaaaaaaaaaaaaaaaaaaaaaaaaaaaaaaaaaaaaaaaaaaaaaaaaaaaaaaaaaaaaaaaaaaaaaaaaaaaaaaaaaaaaaaaaaaaaaaaaaaaaaaaaaaaaaaaaaaaaaaaaaaaaaaaaaaaaaaaaaaaaaaaaaaaaaaaaaaaaaaaaaaaaaaaaaaaaaaaaaaaaaaaaaaaaaaaaaaaaaaaaaaaaaaaaaaaaaaaaaaaaaaaaaaaaaaaaaaaaaaaaaaaaaaaaaaaaaaaaaaaaaaaaaaaaaaaaaaaaaaaaaaaaaaaaaaaaaaaaaaaaaaaaaaaaaaaaaaaaaaaaaaaaaaaaaaaaaaaaaaaaaaaaaaaaaaaaaaaaaaaaaaaaaaaaaaaaaaaaaaaaaaaaaaaaaaaaaaaaaaaaaaaaaaaaaaaaaaaaaaaaaaaaaaaaaaaaaaaaaaaaaaaaaaaaaaaaaaaaaaaaaaaaaaaaaaaaaaaaaaaaaaaaaaaaaaaaaaaaaaaaaaaaaaaaaaaaaaaaaaaaaaaaaaaaaaaaaaaaaaaaaaaaaaaaaaaaaaaaaaaaaaaaaaaaaaaaaaaaaaaaaaaaaaaaaaaaaaaaaaaaaaaaaaaaaaaaaaaaaaaaaaaaaaaaaaaaaaaaaaaaaaaaaaaaaaaaaaaaaaaaaaaaaaaaaaaaaaaaaaaaaaaaaaaaaaaaaaaaaaaaaaaaaaaaaaaaaaaaaaaaaaaaaaaaaaaaaaaaaaaaaaaaaaaaaaaaaaaaaaaaaaaaaaaaaaaaaaaaaaaaaaaaaaaaaaaaaaaaaaaaaaaaaaaaaaaaaaaaaaaaaaaaaaaaaaaaaaaaaaaaaaaaaaaaaaaaaaaaaaaaaaaaaaaaaaaaaaaaaaaaaaaaaaaaaaaaaaaaaaaaaaaaaaaaaaaaaaaaaaaaaaaaaaaaaaaaaaaaaaaaaaaaaaaaaaaaaaaaaaaaaaaaaaaaaaaaaaaaaaaaaaaaaaaaaaaaaaaaaaaaaaaaaaaaaaaaaaaaaaaaaaaaaaaaaaaaaaaaaaaaaaaaaaaaaaaaaaaaaaaaaaaaaaaaaaaaaaaaaaaaaaaaaaaaaaaaaaaaaaaaaaaaaaaaaaaaaaaaaaaaaaaaaaaaaaaaaaaaaaaaaaaaaaaaaaaaaaaaaaaaaaaaaaaaaaaaaaaaaaaaaaaaaaaaaaaaaaaaaaaaaaaaaaaaaaaaaaaaaaaaaaaaaaaaaaaaaaaaaaaaaaaaaaaaaaaaaaaaaaaaaaaaaaaaaaaaaaaaaaaaaaaaaaaaaaaaaaaaaaaaaaaaaaaaaaaaaaaaaaaaaaaaaaaaaaaaaaaaaaaaaaaaaaaaaaaaaaaaaaaaaaaaaaaaaaaaaaaaaaaaaaaaaaaaaaaaaaaaaaaaaaaaaaaaaaaaaaaaaaaaaaaaaaaaaaaaaaaaaaaaaaaaaaaaaaaaaaaaaaaaaaaaaaaaaaaaaaaaaaaaaaaaaaaaaaaaaaaaaaaaaaaaaaaaaaaaaaaaaaaaaaaaaaaaaaaaaaaaaaaaaaaaaaaaaaaaaaaaaaaaaa

SEQ ID NO: 33 - DNA, 150 bp, Artificial Sequence
  source: /note="Description of Artificial Sequence: Synthetic polynucleotide"
aaaaaaaaaaaaaaaaaaaaaaaaaaaaaaaaaaaaaaaaaaaaaaaaaaaaaaaaaaaaaaaaaaaaaaaaaaaaaaaaaaaaaaaaaaaaaaaaaaaaaaaaaaaaaaaaaaaaaaaaaaaaaaaaaaaaaaaaaaaaaaaaaaaaaa

SEQ ID NO: 34 - DNA, 5000 bp, Artificial Sequence
  source: /note="Description of Artificial Sequence: Synthetic polynucleotide"
  misc_feature (1)..(5000): /note="This sequence may encompass 50-5000 nucleotides"
  source: /note="See specification as filed for detailed description of substitutions and preferred embodiments"
aaaaaaaaaaaaaaaaaaaaaaaaaaaaaaaaaaaaaaaaaaaaaaaaaaaaaaaaaaaaaaaaaaaaaaaaaaaaaaaaaaaaaaaaaaaaaaaaaaaaaaaaaaaaaaaaaaaaaaaaaaaaaaaaaaaaaaaaaaaaaaaaaaaaaaaaaaaaaaaaaaaaaaaaaaaaaaaaaaaaaaaaaaaaaaaaaaaaaaaaaaaaaaaaaaaaaaaaaaaaaaaaaaaaaaaaaaaaaaaaaaaaaaaaaaaaaaaaaaaaaaaaaaaaaaaaaaaaaaaaaaaaaaaaaaaaaaaaaaaaaaaaaaaaaaaaaaaaaaaaaaaaaaaaaaaaaaaaaaaaaaaaaaaaaaaaaaaaaaaaaaaaaaaaaaaaaaaaaaaaaaaaaaaaaaaaaaaaaaaaaaaaaaaaaaaaaaaaaaaaaaaaaaaaaaaaaaaaaaaaaaaaaaaaaaaaaaaaaaaaaaaaaaaaaaaaaaaaaaaaaaaaaaaaaaaaaaaaaaaaaaaaaaaaaaaaaaaaaaaaaaaaaaaaaaaaaaaaaaaaaaaaaaaaaaaaaaaaaaaaaaaaaaaaaaaaaaaaaaaaaaaaaaaaaaaaaaaaaaaaaaaaaaaaaaaaaaaaaaaaaaaaaaaaaaaaaaaaaaaaaaaaaaaaaaaaaaaaaaaaaaaaaaaaaaaaaaaaaaaaaaaaaaaaaaaaaaaaaaaaaaaaaaaaaaaaaaaaaaaaaaaaaaaaaaaaaaaaaaaaaaaaaaaaaaaaaaaaaaaaaaaaaaaaaaaaaaaaaaaaaaaaaaaaaaaaaaaaaaaaaaaaaaaaaaaaaaaaaaaaaaaaaaaaaaaaaaaaaaaaaaaaaaaaaaaaaaaaaaaaaaaaaaaaaaaaaaaaaaaaaaaaaaaaaaaaaaaaaaaaaaaaaaaaaaaaaaaaaaaaaaaaaaaaaaaaaaaaaaaaaaaaaaaaaaaaaaaaaaaaaaaaaaaaaaaaaaaaaaaaaaaaaaaaaaaaaaaaaaaaaaaaaaaaaaaaaaaaaaaaaaaaaaaaaaaaaaaaaaaaaaaaaaaaaaaaaaaaaaaaaaaaaaaaaaaaaaaaaaaaaaaaaaaaaaaaaaaaaaaaaaaaaaaaaaaaaaaaaaaaaaaaaaaaaaaaaaaaaaaaaaaaaaaaaaaaaaaaaaaaaaaaaaaaaaaaaaaaaaaaaaaaaaaaaaaaaaaaaaaaaaaaaaaaaaaaaaaaaaaaaaaaaaaaaaaaaaaaaaaaaaaaaaaaaaaaaaaaaaaaaaaaaaaaaaaaaaaaaaaaaaaaaaaaaaaaaaaaaaaaaaaaaaaaaaaaaaaaaaaaaaaaaaaaaaaaaaaaaaaaaaaaaaaaaaaaaaaaaaaaaaaaaaaaaaaaaaaaaaaaaaaaaaaaaaaaaaaaaaaaaaaaaaaaaaaaaaaaaaaaaaaaaaaaaaaaaaaaaaaaaaaaaaaaaaaaaaaaaaaaaaaaaaaaaaaaaaaaaaaaaaaaaaaaaaaaaaaaaaaaaaaaaaaaaaaaaaaaaaaaaaaaaaaaaaaaaaaaaaaaaaaaaaaaaaaaaaaaaaaaaaaaaaaaaaaaaaaaaaaaaaaaaaaaaaaaaaaaaaaaaaaaaaaaaaaaaaaaaaaaaaaaaaaaaaaaaaaaaaaaaaaaaaaaaaaaaaaaaaaaaaaaaaaaaaaaaaaaaaaaaaaaaaaaaaaaaaaaaaaaaaaaaaaaaaaaaaaaaaaaaaaaaaaaaaaaaaaaaaaaaaaaaaaaaaaaaaaaaaaaaaaaaaaaaaaaaaaaaaaaaaaaaaaaaaaaaaaaaaaaaaaaaaaaaaaaaaaaaaaaaaaaaaaaaaaaaaaaaaaaaaaaaaaaaaaaaaaaaaaaaaaaaaaaaaaaaaaaaaaaaaaaaaaaaaaaaaaaaaaaaaaaaaaaaaaaaaaaaaaaaaaaaaaaaaaaaaaaaaaaaaaaaaaaaaaaaaaaaaaaaaaaaaaaaaaaaaaaaaaaaaaaaaaaaaaaaaaaaaaaaaaaaaaaaaaaaaaaaaaaaaaaaaaaaaaaaaaaaaaaaaaaaaaaaaaaaaaaaaaaaaaaaaaaaaaaaaaaaaaaaaaaaaaaaaaaaaaaaaaaaaaaaaaaaaaaaaaaaaaaaaaaaaaaaaaaaaaaaaaaaaaaaaaaaaaaaaaaaaaaaaaaaaaaaaaaaaaaaaaaaaaaaaaaaaaaaaaaaaaaaaaaaaaaaaaaaaaaaaaaaaaaaaaaaaaaaaaaaaaaaaaaaaaaaaaaaaaaaaaaaaaaaaaaaaaaaaaaaaaaaaaaaaaaaaaaaaaaaaaaaaaaaaaaaaaaaaaaaaaaaaaaaaaaaaaaaaaaaaaaaaaaaaaaaaaaaaaaaaaaaaaaaaaaaaaaaaaaaaaaaaaaaaaaaaaaaaaaaaaaaaaaaaaaaaaaaaaaaaaaaaaaaaaaaaaaaaaaaaaaaaaaaaaaaaaaaaaaaaaaaaaaaaaaaaaaaaaaaaaaaaaaaaaaaaaaaaaaaaaaaaaaaaaaaaaaaaaaaaaaaaaaaaaaaaaaaaaaaaaaaaaaaaaaaaaaaaaaaaaaaaaaaaaaaaaaaaaaaaaaaaaaaaaaaaaaaaaaaaaaaaaaaaaaaaaaaaaaaaaaaaaaaaaaaaaaaaaaaaaaaaaaaaaaaaaaaaaaaaaaaaaaaaaaaaaaaaaaaaaaaaaaaaaaaaaaaaaaaaaaaaaaaaaaaaaaaaaaaaaaaaaaaaaaaaaaaaaaaaaaaaaaaaaaaaaaaaaaaaaaaaaaaaaaaaaaaaaaaaaaaaaaaaaaaaaaaaaaaaaaaaaaaaaaaaaaaaaaaaaaaaaaaaaaaaaaaaaaaaaaaaaaaaaaaaaaaaaaaaaaaaaaaaaaaaaaaaaaaaaaaaaaaaaaaaaaaaaaaaaaaaaaaaaaaaaaaaaaaaaaaaaaaaaaaaaaaaaaaaaaaaaaaaaaaaaaaaaaaaaaaaaaaaaaaaaaaaaaaaaaaaaaaaaaaaaaaaaaaaaaaaaaaaaaaaaaaaaaaaaaaaaaaaaaaaaaaaaaaaaaaaaaaaaaaaaaaaaaaaaaaaaaaaaaaaaaaaaaaaaaaaaaaaaaaaaaaaaaaaaaaaaaaaaaaaaaaaaaaaaaaaaaaaaaaaaaaaaaaaaaaaaaaaaaaaaaaaaaaaaaaaaaaaaaaaaaaaaaaaaaaaaaaaaaaaaaaaaaaaaaaaaaaaaaaaaaaaaaaaaaaaaaaaaaaaaaaaaaaaaaaaaaaaaaaaaaaaaaaaaaaaaaaaaaaaaaaaaaaaaaaaaaaaaaaaaaaaaaaaaaaaaaaaaaaaaaaaaaaaaaaaaaaaaaaaaaaaaaaaaaaaaaaaaaaaaaaaaaaaaaaaaaaaaaaaaaaaaaaaaaaaaaaaaaaaaaaaaaaaaaaaaaaaaaaaaaaaaaaaaaaaaaaaaaaaaaaaaaaaaaaaaaaaaaaaaaaaaaaaaaaaaaaaaaaaaaaaaaaaaaaaaaaaaaaaaaaaaaaaaaaaaaaaaaaaaaaaaaaaaaaaaaaaaaaaaaaaaaaaaaaaaaaaaaaaaaaaaaaaaaaaaaaaaaaaaaaaaaaaaaaaaaaaaaaaaaaaaaaaaaaaaaaaaaaaaaaaaaaaaaaaaaaaaaaaaaaaaaaaaaaaaaaaaaaaaaaaaaaaaaaaaaaaaaaaaaaaaaaaaaaaaaaaaaaaaaaaaaaaaaaaaaaaaaaaaaaaaaaaaaaaaaaaaaaaaaaaaaaaaaaaaaaaaaaaaaaaaaaaaaaaaaaaaaaaaaaaaaaaaaaaaaaaaaaaaaaaaaaaaaaaaaaaaaaaaaaaaaaaaaaaaaaaaaaaaaaaaaaaaaaaaaaaaaaaaaaaaaaaaaaaaaaaaaaaaaaaaaaaaaaaaaaaaaaaaaaaaaaaaaaaaaaaaaaaaaaaaaaaaaaaaaaaaaaaaaaaaaaaaaaaaaaaaaaaaaaaaaaaaaaaaaaaaaaaaaaaaaaaaaaaaaaaaaaaaaaaaaaaaaaaaaaaaaaaaaaaaaaaaaaaaaaaaaaaaaaaaaaaaaaaaaaaaaaaaaaaaaaaaaaaaaaaaaaaaaaaaaaaaaaaaaaaaaaaaaaaaaaaaaaaaaaaaaaaaaaaaaaaaaaaaaaaaaaaaaaaaaaaaaaaaaaaaaaaaaaaaaaaaaaaaaaaaaaaaaaaaaaaaaaaaaaaaaaaaaaaaaaaaaaaaaaaaaaaaaaaaaaaaaaaaaaaaaaaaaaaaaaaaaaaaaaaaaaaaaaaaaaaaaaaaaaaaaaaaaaaaaaaaaaaaaaaaaaaaaaaaaaaaaaaaaaaaaaaaaaaaaaaaaaaaaaaaaaaaaaaaaaaaaaaaaaaaaaaaaaaaaaaaaaaaaaaaaaaaaaaaaaaaaaaaaaaaaaaaaaaaaaaaaaaaaaaaaaaaaaaaaaaaaaaaaaaaaaaaaaaaaaaaaaaaaaaaaaaaaaaaaaaaaaaaaaaaaaaaaaaaaaaaaaaaaaaaaaaaaaaaaaaaaaaaaaaaaaaaaaaaaaaaaaaaaaaaaaaaaaaaaaaaaaaaaaaaaaaaaaaaaaaaaaaaaaaaaaaaaaaaaaaaaaaaaaaaaaaaaaaaaaaaaaaaaaaaaaaaaaaaaaaaaaaaaaaaaaaaaaaaaaaaaaaaaaaaaaaaaaaaaaaaaaaaaaaaaaaaaaaaaaaaaaaaaaaaaaaaaaaaaaaaaaaaaaaaaaaaaaaaaaaaaaaaaaaaaaaaaaaaaaaaaaaaaaaaaaaaaaaaaaaaaaaaaaaaaaaaaaaaaaaaaaaaaaaaaaaaaaaaaaaaaaaaaaaaaaaaaaaaaaaaaaaaaaaaaaaaaaaaaaaaaaaaaaaaaaaaaaaaaaaaaaaaaaaaaaaaaaaaaaaaaaaaaaaaaaaaaaaaaaaaaaaaaaaaaaaaaaaaaaaaaaaaaaaaaaaaaaaaaaaaaaaaaaaaaaaaaaaaaaaaaaaaaaaaaaaaaaaaaaaaaaaaaaaaaaaaaaaaaaaaa

SEQ ID NO: 35 - DNA, 100 bp, Artificial Sequence
  source: /note="Description of Artificial Sequence: Synthetic polynucleotide"
tttttttttttttttttttttttttttttttttttttttttttttttttttttttttttttttttttttttttttttttttttttttttttttttttttt

SEQ ID NO: 36 - DNA, 5000 bp, Artificial Sequence
  source: /note="Description of Artificial Sequence: Synthetic polynucleotide"
  misc_feature (1)..(5000): /note="This sequence may encompass 50-5000 nucleotides"
  source: /note="See specification as filed for detailed description of substitutions and preferred embodiments"
tttttttttttttttttttttttttttttttttttttttttttttttttttttttttttttttttttttttttttttttttttttttttttttttttttttttttttttttttttttttttttttttttttttttttttttttttttttttttttttttttttttttttttttttttttttttttttttttttttttttttttttttttttttttttttttttttttttttttttttttttttttttttttttttttttttttttttttttttttttttttttttttttttttttttttttttttttttttttttttttttttttttttttttttttttttttttttttttttttttttttttttttttttttttttttttttttttttttttttttttttttttttttttttttttttttttttttttttttttttttttttttttttttttttttttttttttttttttttttttttttttttttttttttttttttttttttttttttttttttttttttttttttttttttttttttttttttttttttttttttttttttttttttttttttttttttttttttttttttttttttttttttttttttttttttttttttttttttttttttttttttttttttttttttttttttttttttttttttttttttttttttttttttttttttttttttttttttttttttttttttttttttttttttttttttttttttttttttttttttttttttttttttttttttttttttttttttttttttttttttttttttttttttttttttttttttttttttttttttttttttttttttttttttttttttttttttttttttttttttttttttttttttttttttttttttttttttttttttttttttttttttttttttttttttttttttttttttttttttttttttttttttttttttttttttttttttttttttttttttttttttttttttttttttttttttttttttttttttttttttttttttttttttttttttttttttttttttttttttttttttttttttttttttttttttttttttttttttttttttttttttttttttttttttttttttttttttttttttttttttttttttttttttttttttttttttttttttttttttttttttttttttttttttttttttttttttttttttttttttttttttttttttttttttttttttttttttttttttttttttttttttttttttttttttttttttttttttttttttttttttttttttttttttttttttttttttttttttttttttttttttttttttttttttttttttttttttttttttttttttttttttttttttttttttttttttttttttttttttttttttttttttttttttttttttttttttttttttttttttttttttttttttttttttttttttttttttttttttttttttttttttttttttttttttttttttttttttttttttttttttttttttttttttttttttttttttttttttttttttttttttttttttttttttttttttttttttttttttttttttttttttttttttttttttttttttttttttttttttttttttttttttttttttttttttttttttttttttttttttttttttttttttttttttttttttttttttttttttttttttttttttttttttttttttttttttttttttttttttttttttttttttttttttttttttttttttttttttttttttttttttttttttttttttttttttttttttttttttttttttttttttttttttttttttttttttttttttttttttttttttttttttttttttttttttttttttttttttttttttttttttttttttttttttttttttttttttttttttttttttttttttttttttttttttttttttttttttttttttttttttttttttttttttttttttttttttttttttttttttttttttttttttttttttttttttttttttttttttttttttttttttttttttttttttttttttttttttttttttttttttttttttttttttttttttttttttttttttttttttttttttttttttttttttttttttttttttttttttttttttttttttttttttttttttttttttttttttttttttttttttttttttttttttttttttttttttttttttttttttttttttttttttttttttttttttttttttttttttttttttttttttttttttttttttttttttttttttttttttttttttttttttttttttttttttttttttttttttttttttttttttttttttttttttttttttttttttttttttttttttttttttttttttttttttttttttttttttttttttttttttttttttttttttttttttttttttttttttttttttttttttttttttttttttttttttttttttttttttttttttttttttttttttttttttttttttttttttttttttttttttttttttttttttttttttttttttttttttttttttttttttttttttttttttttttttttttttttttttttttttttttttttttttttttttttttttttttttttttttttttttttttttttttttttttttttttttttttttttttttttttttttttttttttttttttttttttttttttttttttttttttttttttttttttttttttttttttttttttttttttttttttttttttttttttttttttttttttttttttttttttttttttttttttttttttttttttttttttttttttttttttttttttttttttttttttttttttttttttttttttttttttttttttttttttttttttttttttttttttttttttttttttttttttttttttttttttttttttttttttttttttttttttttttttttttttttttttttttttttttttttttttttttttttttttttttttttttttttttttttttttttttttttttttttttttttttttttttttttttttttttttttttttttttttttttttttttttttttttttttttttttttttttttttttttttttttttttttttttttttttttttttttttttttttttttttttttttttttttttttttttttttttttttttttttttttttttttttttttttttttttttttttttttttttttttttttttttttttttttttttttttttttttttttttttttttttttttttttttttttttttttttttttttttttttttttttttttttttttttttttttttttttttttttttttttttttttttttttttttttttttttttttttttttttttttttttttttttttttttttttttttttttttttttttttttttttttttttttttttttttttttttttttttttttttttttttttttttttttttttttttttttttttttttttttttttttttttttttttttttttttttttttttttttttttttttttttttttttttttttttttttttttttttttttttttttttttttttttttttttttttttttttttttttttttttttttttttttttttttttttttttttttttttttttttttttttttttttttttttttttttttttttttttttttttttttttttttttttttttttttttttttttttttttttttttttttttttttttttttttttttttttttttttttttttttttttttttttttttttttttttttttttttttttttttttttttttttttttttttttttttttttttttttttttttttttttttttttttttttttttttttttttttttttttttttttttttttttttttttttttttttttttttttttttttttttttttttttttttttttttttttttttttttttttttttttttttttttttttttttttttttttttttttttttttttttttttttttttttttttttttttttttttttttttttttttttttttttttttttttttttttttttttttttttttttttttttttttttttttttttttttttttttttttttttttttttttttttttttttttttttttttttttttttttttttttttttttttttttttttttttttttttttttttttttttttttttttttttttttttttttttttttttttttttttttttttttttttttttttttttttttttttttttttttttttttttttttttttttttttttttttttttttttttttttttttttttttttttttttttttttttttttttttttttttttttttttttttttttttttttttttttttttttttttttttttttttttttttttttttttttttttttttttttttttttttttttttttttttttttttttttttttttttttttttttttttttttttttttttttttttttttttttttttttttttttttttttttttttttttttttttttttttttttttttttttttttttttttttttttttttttttttttttttttttttttttttttttttttttttttttttttttttttttttttttttttttttttttttttttttttttttttttttttttttttttttttttttttttttttttttttttttttttttttttttttttttttttttttttttttttttttttttttttttttttttttttttttttttttttttttttttttttttttttttttttttttttttttttttttttt

SEQ ID NO: 37 - DNA, 5000 bp, Artificial Sequence; identical to SEQ ID NO: 34
  source: /note="Description of Artificial Sequence: Synthetic polynucleotide"
  misc_feature (1)..(5000): /note="This sequence may encompass 100-5000 nucleotides"
  source: /note="See specification as filed for detailed description of substitutions and preferred embodiments"

SEQ ID NO: 38 - DNA, 400 bp, Artificial Sequence
  source: /note="Description of Artificial Sequence: Synthetic polynucleotide"
  misc_feature (1)..(400): /note="This sequence may encompass 100-400 nucleotides"
  source: /note="See specification as filed for detailed description of substitutions and preferred embodiments"
aaaaaaaaaaaaaaaaaaaaaaaaaaaaaaaaaaaaaaaaaaaaaaaaaaaaaaaaaaaaaaaaaaaaaaaaaaaaaaaaaaaaaaaaaaaaaaaaaaaaaaaaaaaaaaaaaaaaaaaaaaaaaaaaaaaaaaaaaaaaaaaaaaaaaaaaaaaaaaaaaaaaaaaaaaaaaaaaaaaaaaaaaaaaaaaaaaaaaaaaaaaaaaaaaaaaaaaaaaaaaaaaaaaaaaaaaaaaaaaaaaaaaaaaaaaaaaaaaaaaaaaaaaaaaaaaaaaaaaaaaaaaaaaaaaaaaaaaaaaaaaaaaaaaaaaaaaaaaaaaaaaaaaaaaaaaaaaaaaaaaaaaaaaaaaaaaaaaaaaaaaaaaaaaaaaaaaaaaaaaaaaaaaaaaaaaaaaaaaaa

SEQ ID NO: 39 - protein, 373 aa, Artificial Sequence
  source: /note="Description of Artificial Sequence: Synthetic polypeptide"
PGWFLDSPDRPWNPPTFSPALLVVTEGDNATFTCSFSNTSESFVLNWYRMSPSNQTDKLAAFPEDRSQPGQDCRFRVTQLPNGRDFHMSVVRARRNDSGTYLCGAISLAPKAQIKESLRAELRVTERRAEVPTAHPSPSPRPAGQFQTLVTTTPAPRPPTPAPTIASQPLSLRPEACRPAAGGAVHTRGLDFACDIYIWAPLAGTCGVLLLSLVITLYCKRGRKKLLYIFKQPFMRPVQTTQEEDGCSCRFPEEEEGGCELRVKFSRSADAPAYKQGQNQLYNELNLGRREEYDVLDKRRGRDPEMGGKPRRKNPQEGLYNELQKDKMAEAYSEIGMKGERRRGKGHDGLYQGLSTATKDTYDALHMQALPPR

SEQ ID NO: 40 - protein, 100 aa, Homo sapiens
MVRWFHRDLSGLDAETLLKGRGVHGSFLARPSRKNQGDFSLSVRVGDQVTHIRIQNSGDFYDLYGGEKFATLTELVEYYTQQQGVLQDRDGTIIHLKYPL

SEQ ID NO: 41 - protein, 100 aa, Artificial Sequence
  source: /note="Description of Artificial Sequence: Synthetic polypeptide"
MVRWFHRDLSGLDAETLLKGRGVHGSFLAKPSRKNQGDFSLSVRVGDQVTHIRIQNSGDFYDLYGGEKFATLTELVEYYTQQQGVLQDRDGTIIHLKYPL

SEQ ID NO: 42 - protein, 100 aa, Artificial Sequence
  source: /note="Description of Artificial Sequence: Synthetic polypeptide"
MVRWFHRDLSGLDAETLLKGRGVHGSFLAHPSRKNQGDFSLSVRVGDQVTHIRIQNSGDFYDLYGGEKFATLTELVEYYTQQQGVLQDRDGTIIHLKYPL

SEQ ID NO: 43 - protein, 102 aa, Homo sapiens
MTSRRWFHPNITGVEAENLLLTRGVDGSFLARPSKSNPGDFTLSVRRNGAVTHIKIQNTGDYYDLYGGEKFATLAELVQYYMEHHGQLKEKNGDVIELKYPL

SEQ ID NO: 44 - protein, 102 aa, Artificial Sequence
  source: /note="Description of Artificial Sequence: Synthetic polypeptide"
MTSRRWFHPNITGVEAENLLLTRGVDGSFLAKPSKSNPGDFTLSVRRNGAVTHIKIQNTGDYYDLYGGEKFATLAELVQYYMEHHGQLKEKNGDVIELKYPL

SEQ ID NO: 45 - protein, 102 aa, Artificial Sequence
  source: /note="Description of Artificial Sequence: Synthetic polypeptide"
MTSRRWFHPNITGVEAENLLLTRGVDGSFLAHPSKSNPGDFTLSVRRNGAVTHIKIQNTGDYYDLYGGEKFATLAELVQYYMEHHGQLKEKNGDVIELKYPL

SEQ ID NO: 46 - protein, 101 aa, Unknown
  source: /note="Description of Unknown: SHP-2 sequence"
  MOD_RES (32)..(32): Any amino acid
MTSRRWFHPNITGVEAENLLLTRGVDGSFLAXSKSNPGDFTLSVRRNGAVTHIKIQNTGDYYDLYGGEKFATLAELVQYYMEHHGQLKEKNGDVIELKYPL

SEQ ID NO: 47-51 - skipped (5 entries)

SEQ ID NO: 52 - protein, 132 aa, Artificial Sequence
  source: /note="Description of Artificial Sequence: Synthetic polypeptide"
DVPDYASLGGPSSPKKKRKVSRGVQVETISPGDGRTFPKRGQTCVVHYTGMLEDGKKFDSSRDRNKPFKFMLGKQEVIRGWEEGVAQMSVGQRAKLTISPDYAYGATGHPGIIPPHATLVFDVELLKLETSY

SEQ ID NO: 53 - protein, 108 aa, Artificial Sequence
  source: /note="Description of Artificial Sequence: Synthetic polypeptide"
VQVETISPGDGRTFPKRGQTCVVHYTGMLEDGKKFDSSRDRNKPFKFMLGKQEVIRGWEEGVAQMSVGQRAKLTISPDYAYGATGHPGIIPPHATLVFDVELLKLETS

SEQ ID NO: 54 - protein, 93 aa, Artificial Sequence [sequence omitted]

SEQ ID NO: 55 - protein, 95 aa, Artificial Sequence
  source: /note="Description of Artificial Sequence: Synthetic polypeptide"
ILWHEMWHEGLIEASRLYFGERNVKGMFEVLEPLHAMMERGPQTLKETSFNQAYGRDLMEAQEWCRKYMKSGNVKDLTQAWDLYYHVFRRISKTS

SEQ ID NO: 56 - protein, 95 aa, Artificial Sequence
  source: /note="Description of Artificial Sequence: Synthetic polypeptide"
ILWHEMWHEGLLEASRLYFGERNVKGMFEVLEPLHAMMERGPQTLKETSFNQAYGRDLMEAQEWCRKYMKSGNVKDLTQAWDLYYHVFRRISKTS

SEQ ID NO: 57 - protein, 95 aa, Artificial Sequence
  source: /note="Description of Artificial Sequence: Synthetic polypeptide"
ILWHEMWHEGLEEASRLYFGERNVKGMFEVLEPLHAMMERGPQTLKETSFNQAYGRDLMEAQEWCRKYMKSGNVKDLLQAWDLYYHVFRRISKTS

SEQ ID NO: 58 - protein, 95 aa, Artificial Sequence
  source: /note="Description of Artificial Sequence: Synthetic polypeptide"
  MOD_RES (12)..(12): Any amino acid
  MOD_RES (78)..(78): Any amino acid
ILWHEMWHEGLXEASRLYFGERNVKGMFEVLEPLHAMMERGPQTLKETSFNQAYGRDLMEAQEWCRKYMKSGNVKDLXQAWDLYYHVFRRISKTS

SEQ ID NO: 59 - protein, 95 aa, Artificial Sequence
  source: /note="Description of Artificial Sequence: Synthetic polypeptide"
ILWHEMWHEGLIEASRLYFGERNVKGMFEVLEPLHAMMERGPQTLKETSFNQAYGRDLMEAQEWCRKYMKSGNVKDLLQAWDLYYHVFRRISKTS

SEQ ID NO: 60 - protein, 95 aa, Artificial Sequence
  source: /note="Description of Artificial Sequence: Synthetic polypeptide"
ILWHEMWHEGLLEASRLYFGERNVKGMFEVLEPLHAMMERGPQTLKETSFNQAYGRDLMEAQEWCRKYMKSGNVKDLLQAWDLYYHVFRRISKTS

SEQ ID NO: 61 - protein, 1132 aa, Homo sapiens [sequence omitted]

SEQ ID NO: 62 - DNA, 4027 bp, Homo sapiens
caggcagcgtggtcctgctgcgcacgtgggaagccctggccccggccacccccgcgatgccgcgcgctccccgctgccgagccgtgcgctccctgctgcgcagccactaccgcgaggtgctgccgctggccacgttcgtgcggcgcctggggccccagggctggcggctggtgcagcgcggggacccggcggctttccgcgcgctggtggcccagtgcctggtgtgcgtgccctgggacgcacggccgccccccgccgccccctccttccgccaggtgtcctgcctgaaggagctggtggcccgagtgctgcagaggctgtgcgagcgcggcgcgaagaacgtgctggccttcggcttcgcgctgctggacggggcccgcgggggcccccccgaggccttcaccaccagcgtgcgcagctacctgcccaacacggtgaccgacgcactgcgggggagcggggcgtgggggctgctgttgcgccgcgtgggcgacgacgtgctggttcacctgctggcacgctgcgcgctctttgtgctggtggctcccagctgcgcctaccaggtgtgcgggccgccgctgtaccagctcggcgctgccactcaggcccggcccccgccacacgctagtggaccccgaaggcgtctgggatgcgaacgggcctggaaccatagcgtcagggaggccggggtccccctgggcctgccagccccgggtgcgaggaggcgcgggggcagtgccagccgaagtctgccgttgcccaagaggcccaggcgtggcgctgcccctgagccggagcggacgcccgttgggcaggggtcctgggcccacccgggcaggacgcgtggaccgagtgaccgtggtttctgtgtggtgtcacctgccagacccgccgaagaagccacctctttggagggtgcgctctctggcacgcgccactcccacccatccgtgggccgccagcaccacgcgggccccccatccacatcgcggccaccacgtccctgggacacgccttgtcccccggtgtacgccgagaccaagcacttcctctactcctcaggcgacaaggagcagctgcggccctccttcctactcagctctctgaggcccagcctgactggcgctcggaggctcgtggagaccatctttctgggttccaggccctggatgccagggactccccgcaggttgccccgcctgccccagcgctactggcaaatgcggcccctgtttctggagctgcttgggaaccacgcgcagtgcccctacggggtgctcctcaagacgcactgcccgctgcgagctgcggtcaccccagcagccggtgtctgtgcccgggagaagccccagggctctgtggcggcccccgaggaggaggacacagacccccgtcgcctggtgcagctgctccgccagcacagcagcccctggcaggtgtacggcttcgtgcgggcctgcctgcgccggctggtgcccccaggcctctggggctccaggcacaacgaacgccgcttcctcaggaacaccaagaagttcatctccctggggaagcatgccaagctctcgctgcaggagctgacgtggaagatgagcgtgcggggctgcgcttggctgcgcaggagcccaggggttggctgtgttccggccgcagagcaccgtctgcgtgaggagatcctggccaagttcctgcactggctgatgagtgtgtacgtcgtcgagctgctcaggtctttcttttatgtcacggagaccacgtttcaaaagaacaggctctttttctaccggaagagtgtctggagcaagttgcaaagcattggaatcagacagcacttgaagagggtgcagctgcgggagctgtcggaagcagaggtcaggcagcatcgggaagccaggcccgccctgctgacgtccagactccgcttcatccccaagcctgacgggctgcggccgattgtgaacatggactacgtcgtgggagccagaacgttccgcagagaaaagagggccgagcgtctcacctcgagggtgaaggcactgttcagcgtgctcaactacgagcgggcgcggcgccccggcctcctgggcgcctctgtgctgggcctggacgatatccacagggcctggcgcaccttcgtgctgcgtgtgcgggcccaggacccgccgcctgagctgtactttgtcaaggtggatgtgacgggcgcgtacgacaccatcccccaggacaggctcacggaggtcatcgccagcatcatcaaaccccagaacacgtactgcgtgcgtcggtatgccgtggtccagaaggccgcccatgggcacgtccgcaaggccttcaagagccacgtctctaccttgacagacctccagccgtacatgcgacagttcgtggctcacctgcaggagaccagcccgctgagggatgccgtcgtcatcgagcagagctcctccctgaatgaggccagcagtggcctcttcgacgtcttcctacgcttcatgtgccaccacgccgtgcgcatcaggggcaagtcctacgtccagtgccaggggatcccgcagggctccatcctctccacgctgctctgcagcctgtgctacggcgacatggagaacaagctgtttgcggggattcggcgggacgggctgctcctgcgtttggtggatgatttcttgttggtgacacctcacctcacccacgcgaaaaccttcctcaggaccctggtccgaggtgtccctgagtatggctgcgtggtgaacttgcggaagacagtggtgaacttccctgtagaagacgaggccctgggtggcacggcttttgttcagatgccggcccacggcctattcccctggtgcggcctgctgctggatacccggaccctggaggtgcagagcgactactccagctatgcccggacctccatcagagccagtctcaccttcaaccgcggcttcaaggctgggaggaacatgcgtcgcaaactctttggggtcttgcggctgaagtgtcacagcctgtttctggatttgcaggtgaacagcctccagacggtgtgcaccaacatctacaagatcctcctgctgcaggcgtacaggtttcacgcatgtgtgctgcagctcccatttcatcagcaagtttggaagaaccccacatttttcctgcgcgtcatctctgacacggcctccctctgctactccatcctgaaagccaagaacgcagggatgtcgctgggggccaagggcgccgccggccctctgccctccgaggccgtgcagtggctgtgccaccaagcattcctgctcaagctgactcgacaccgtgtcacctacgtgccactcctggggtcactcaggacagcccagacgcagctgagtcggaagctcccggggacgacgctgactgccctggaggccgcagccaacccggcactgccctcagacttcaagaccatcctggactgatggccacccgcccacagccaggccgagagcagacaccagcagccctgtcacgccgggctctacgtcccagggagggaggggcggcccacacccaggcccgcaccgctgggagtctgaggcctgagtgagtgtttggccgaggcctgcatgtccggctgaaggctgagtgtccggctgaggcctgagcgagtgtccagccaagggctgagtgtccagcacacctgccgtcttcacttccccacaggctggcgctcggctccaccccagggccagcttttcctcaccaggagcccggcttccactccccacataggaatagtccatccccagattcgccattgttcacccctcgccctgccctcctttgccttccacccccaccatccaggtggagaccctgagaaggaccctgggagctctgggaatttggagtgaccaaaggtgtgccctgtacacaggcgaggaccctgcacctggatgggggtccctgtgggtcaaattggggggaggtgctgtgggagtaaaatactgaatatatgagtttttcagttttgaaaaaaaaaaaaaaaaaa

SEQ ID NO: 63-77 - skipped (15 entries)

SEQ ID NO: 78 - protein, 30 aa, Artificial Sequence
  source: /note="Description of Artificial Sequence: Synthetic polypeptide"
  MISC_FEATURE (1)..(30): /note="This sequence may encompass 1-6 'Gly Gly Gly Gly Ser' repeating units"
  source: /note="See specification as filed for detailed description of substitutions and preferred embodiments"
GGGGSGGGGSGGGGSGGGGSGGGGSGGGGS

SEQ ID NO: 79-111 - skipped (33 entries)

SEQ ID NO: 112 - protein, 4 aa, Artificial Sequence
  source: /note="Description of Artificial Sequence: Synthetic peptide"
RGDS

SEQ ID NO: 113-399 - skipped (287 entries)

SEQ ID NO: 400 - DNA, 1184 bp, Artificial Sequence
  source: /note="Description of Artificial Sequence: Synthetic polynucleotide"
cgtgaggctccggtgcccgtcagtgggcagagcgcacatcgcccacagtccccgagaagttggggggaggggtcggcaattgaaccggtgcctagagaaggtggcgcggggtaaactgggaaagtgatgtcgtgtactggctccgcctttttcccgagggtgggggagaaccgtatataagtgcagtagtcgccgtgaacgttctttttcgcaacgggtttgccgccagaacacaggtaagtgccgtgtgtggttcccgcgggcctggcctctttacgggttatggcccttgcgtgccttgaattacttccacctggctgcagtacgtgattcttgatcccgagcttcgggttggaagtgggtgggagagttcgaggccttgcgcttaaggagccccttcgcctcgtgcttgagttgaggcctggcctgggcgctggggccgccgcgtgcgaatctggtggcaccttcgcgcctgtctcgctgctttcgataagtctctagccatttaaaatttttgatgacctgctgcgacgctttttttctggcaagatagtcttgtaaatgcgggccaagatctgcacactggtatttcggtttttggggccgcgggcggcgacggggcccgtgcgtcccagcgcacatgttcggcgaggcggggcctgcgagcgcggccaccgagaatcggacgggggtagtctcaagctggccggcctgctctggtgcctggcctcgcgccgccgtgtatcgccccgccctgggcggcaaggctggcccggtcggcaccagttgcgtgagcggaaagatggccgcttcccggccctgctgcagggagctcaaaatggaggacgcggcgctcgggagagcgggcgggtgagtcacccacacaaaggaaaagggcctttccgtcctcagccgtcgcttcatgtgactccacggagtaccgggcgccgtccaggcacctcgattagttctcgagcttttggagtacgtcgtctttaggttggggggaggggttttatgcgatggagtttccccacactgagtgggtggagactgaagttaggccagcttggcacttgatgtaattctccttggaatttgccctttttgagtttggatcttggttcattctcaagcctcagacagtggttcaaagtttttttcttccatttcaggtgtcgtga

SEQ ID NO: 401 - protein, 21 aa, Artificial Sequence
  source: /note="Description of Artificial Sequence: Synthetic peptide"
MALPVTALLLPLALLLHAARP

SEQ ID NO: 402 - DNA, 63 bp, Artificial Sequence
  source: /note="Description of Artificial Sequence: Synthetic oligonucleotide"
atggccctgcctgtgacagccctgctgctgcctctggctctgctgctgcatgccgctagaccc

SEQ ID NO: 403 - protein, 45 aa, Artificial Sequence
  source: /note="Description of Artificial Sequence: Synthetic polypeptide"
TTTPAPRPPTPAPTIASQPLSLRPEACRPAAGGAVHTRGLDFACD

SEQ ID NO: 404 - DNA, 135 bp, Artificial Sequence
  source: /note="Description of Artificial Sequence: Synthetic polynucleotide"
accacgacgccagcgccgcgaccaccaacaccggcgcccaccatcgcgtcgcagcccctgtccctgcgcccagaggcgtgccggccagcggcggggggcgcagtgcacacgagggggctggacttcgcctgtgat

SEQ ID NO: 405 - protein, 230 aa, Artificial Sequence
  source: /note="Description of Artificial Sequence: Synthetic polypeptide"
ESKYGPPCPPCPAPEFLGGPSVFLFPPKPKDTLMISRTPEVTCVVVDVSQEDPEVQFNWYVDGVEVHNAKTKPREEQFNSTYRVVSVLTVLHQDWLNGKEYKCKVSNKGLPSSIEKTISKAKGQPREPQVYTLPPSQEEMTKNQVSLTCLVKGFYPSDIAVEWESNGQPENNYKTTPPVLDSDGSFFLYSRLTVDKSRWQEGNVFSCSVMHEALHNHYTQKSLSLSLGKM

SEQ ID NO: 406 - DNA, 690 bp, Artificial Sequence
  source: /note="Description of Artificial Sequence: Synthetic polynucleotide"
gagagcaagtacggccctccctgccccccttgccctgcccccgagttcctgggcggacccagcgtgttcctgttcccccccaagcccaaggacaccctgatgatcagccggacccccgaggtgacctgtgtggtggtggacgtgtcccaggaggaccccgaggtccagttcaactggtacgtggacggcgtggaggtgcacaacgccaagaccaagccccgggaggagcagttcaatagcacctaccgggtggtgtccgtgctgaccgtgctgcaccaggactggctgaacggcaaggaatacaagtgtaaggtgtccaacaagggcctgcccagcagcatcgagaaaaccatcagcaaggccaagggccagcctcgggagccccaggtgtacaccctgccccctagccaagaggagatgaccaagaaccaggtgtccctgacctgcctggtgaagggcttctaccccagcgacatcgccgtggagtgggagagcaacggccagcccgagaacaactacaagaccaccccccctgtgctggacagcgacggcagcttcttcctgtacagccggctgaccgtggacaagagccggtggcaggagggcaacgtctttagctgctccgtgatgcacgaggccctgcacaaccactacacccagaagagcctgagcctgtccctgggcaagatg

SEQ ID NO: 407 - protein, 282 aa, Artificial Sequence
  source: /note="Description of Artificial Sequence: Synthetic polypeptide"
RWPESPKAQASSVPTAQPQAEGSLAKATTAPATTRNTGRGGEEKKKEKEKEEQEERETKTPECPSHTQPLGVYLLTPAVQDLWLRDKATFTCFVVGSDLKDAHLTWEVAGKVPTGGVEEGLLERHSNGSQSQHSRLTLPRSLWNAGTSVTCTLNHPSLPPQRLMALREPAAQAPVKLSLNLLASSDPPEAASWLLCEVSGFSPPNILLMWLEDQREVNTSGFAPARPPPQPGSTTFWAWSVLRVPAPPSPQPATYTCVVSHEDSRTLLNASRSLEVSYVTDH

SEQ ID NO: 408 - DNA, 847 bp, Artificial Sequence
  source: /note="Description of Artificial Sequence: Synthetic polynucleotide"
aggtggcccgaaagtcccaaggcccaggcatctagtgttcctactgcacagccccaggcagaaggcagcctagccaaagctactactgcacctgccactacgcgcaatactggccgtggcggggaggagaagaaaaaggagaaagagaaagaagaacaggaagagagggagaccaagacccctgaatgtccatcccatacccagccgctgggcgtctatctcttgactcccgcagtacaggacttgtggcttagagataaggccacctttacatgtttcgtcgtgggctctgacctgaaggatgcccatttgacttgggaggttgccggaaaggtacccacagggggggttgaggaagggttgctggagcgccattccaatggctctcagagccagcactcaagactcacccttccgagatccctgtggaacgccgggacctctgtcacatgtactctaaatcatcctagcctgcccccacagcgtctgatggcccttagagagccagccgcccaggcaccagttaagcttagcctgaatctgctcgccagtagtgatcccccagaggccgccagctggctcttatgcgaagtgtccggctttagcccgcccaacatcttgctcatgtggctggaggaccagcgagaagtgaacaccagcggcttcgctccagcccggcccccaccccagccgggttctaccacattctgggcctggagtgtcttaagggtcccagcaccacctagcccccagccagccacatacacctgtgttgtgtcccatgaagatagcaggaccctgctaaatgcttctaggagtctggaggtttcctacgtgactgaccatt

SEQ ID NO: 409 - protein, 107 aa, Artificial Sequence
  source: /note="Description of Artificial Sequence: Synthetic polypeptide"
DIQMTQTTSSLSASLGDRVTISCRASQDISKYLNWYQQKPDGTVKLLIYHTSRLHSGVPSRFSGSGSGTDYSLTISNLEQEDIATYFCQQGNTLPYTFGGGTKLEIT

SEQ ID NO: 410 - protein, 120 aa, Artificial Sequence
  source: /note="Description of Artificial Sequence: Synthetic polypeptide"
EVKLQESGPGLVAPSQSLSVTCTVSGVSLPDYGVSWIRQPPRKGLEWLGVIWGSETTYYNSALKSRLTIIKDNSKSQVFLKMNSLQTDDTAIYYCAKHYYYGGSYAMDYWGQGTSVTVSS

SEQ ID NO: 411 - protein, 245 aa, Artificial Sequence
  source: /note="Description of Artificial Sequence: Synthetic polypeptide"
DIQMTQTTSSLSASLGDRVTISCRASQDISKYLNWYQQKPDGTVKLLIYHTSRLHSGVPSRFSGSGSGTDYSLTISNLEQEDIATYFCQQGNTLPYTFGGGTKLEITGSTSGSGKPGSGEGSTKGEVKLQESGPGLVAPSQSLSVTCTVSGVSLPDYGVSWIRQPPRKGLEWLGVIWGSETTYYNSALKSRLTIIKDNSKSQVFLKMNSLQTDDTAIYYCAKHYYYGGSYAMDYWGQGTSVTVSS

SEQ ID NO: 412 - protein, 489 aa, Artificial Sequence
  source: /note="Description of Artificial Sequence: Synthetic polypeptide"
MLLLVTSLLLCELPHPAFLLIPDIQMTQTTSSLSASLGDRVTISCRASQDISKYLNWYQQKPDGTVKLLIYHTSRLHSGVPSRFSGSGSGTDYSLTISNLEQEDIATYFCQQGNTLPYTFGGGTKLEITGSTSGSGKPGSGEGSTKGEVKLQESGPGLVAPSQSLSVTCTVSGVSLPDYGVSWIRQPPRKGLEWLGVIWGSETTYYNSALKSRLTIIKDNSKSQVFLKMNSLQTDDTAIYYCAKHYYYGGSYAMDYWGQGTSVTVSSAAAIEVMYPPPYLDNEKSNGTIIHVKGKHLCPSPLFPGPSKPFWVLVVVGGVLACYSLLVTVAFIIFWVRSKRSRLLHSDYMFMTPRRPGPTRKHYQPYAPPRDFAAYRSRVKFSRSADAPAYQQGQNQLYNELNLGRREEYDVLDKRRGRDPEMGGKPRRKNPQEGLYNELQKDKMAEAYSEIGMKGERRRGKGHDGLYQGLSTATKDTYDALHMQALPPR

SEQ ID NO: 413 - protein, 489 aa, Artificial Sequence
  source: /note="Description of Artificial Sequence: Synthetic polypeptide"
MLLLVTSLLLCELPHPAFLLIPDIQMTQTTSSLSASLGDRVTISCRASQDISKYLNWYQQKPDGTVKLLIYHTSRLHSGVPSRFSGSGSGTDYSLTISNLEQEDIATYFCQQGNTLPYTFGGGTKLEITGSTSGSGKPGSGEGSTKGEVKLQESGPGLVAPSQSLSVTCTVSGVSLPDYGVSWIRQPPRKGLEWLGVIWGSETTYYNSALKSRLTIIKDNSKSQVFLKMNSLQTDDTAIYYCAKHYYYGGSYAMDYWGQGTSVTVSSAAAIEVMYPPPYLDNEKSNGTIIHVKGKHLCPSPLFPGPSKPFWVLVVVGGVLACYSLLVTVAFIIFWVRSKRSRLLHSDFMNMTPRRPGPTRKHYQPYAPPRDFAAYRSRVKFSRSADAPAYQQGQNQLYNELNLGRREEYDVLDKRRGRDPEMGGKPRRKNPQEGLYNELQKDKMAEAYSEIGMKGERRRGKGHDGLYQGLSTATKDTYDALHMQALPPR

SEQ ID NO: 414 - protein, 489 aa, Artificial Sequence
  source: /note="Description of Artificial Sequence: Synthetic polypeptide"
MLLLVTSLLLCELPHPAFLLIPDIQMTQTTSSLSASLGDRVTISCRASQDISKYLNWYQQKPDGTVKLLIYHTSRLHSGVPSRFSGSGSGTDYSLTISNLEQEDIATYFCQQGNTLPYTFGGGTKLEITGSTSGSGKPGSGEGSTKGEVKLQESGPGLVAPSQSLSVTCTVSGVSLPDYGVSWIRQPPRKGLEWLGVIWGSETTYYNSALKSRLTIIKDNSKSQVFLKMNSLQTDDTAIYYCAKHYYYGGSYAMDYWGQGTSVTVSSAAAIEVMYPPPYLDNEKSNGTIIHVKGKHLCPSPLFPGPSKPFWVLVVVGGVLACYSLLVTVAFIIFWVRSKRSRLLHSDFMFMTPRRPGPTRKHYQPYAPPRDFAAYRSRVKFSRSADAPAYQQGQNQLYNELNLGRREEYDVLDKRRGRDPEMGGKPRRKNPQEGLYNELQKDKMAEAYSEIGMKGERRRGKGHDGLYQGLSTATKDTYDALHMQALPPR

SEQ ID NO: 415 - protein, 109 aa, Artificial Sequence
  source: /note="Description of Artificial Sequence: Synthetic polypeptide"
ELVLTQSPKFMSTSVGDRVSVTCKASQNVGTNVAWYQQKPGQSPKPLIYSATYRNSGVPDRFTGSGSGTDFTLTITNVQSKDLADYFCQYNRYPYTSFFFTKLEIKRRS

SEQ ID NO: 416 - protein, 119 aa, Artificial Sequence
  source: /note="Description of Artificial Sequence: Synthetic polypeptide"
QVQLLESGAELVRPGSSVKISCKASGYAFSSYWMNWVKQRPGQGLEWIGQIYPGDGDTNYNGKFKGQATLTADKSSSTAYMQLSGLTSEDSAVYSCARKTISSVVDFYFDYWGQGTTVT

SEQ ID NO: 417 - protein, 244 aa, Artificial Sequence
  source: /note="Description of Artificial Sequence: Synthetic polypeptide"
QVQLLESGAELVRPGSSVKISCKASGYAFSSYWMNWVKQRPGQGLEWIGQIYPGDGDTNYNGKFKGQATLTADKSSSTAYMQLSGLTSEDSAVYSCARKTISSVVDFYFDYWGQGTTVTGGGSGGGSGGGSGGGSELVLTQSPKFMSTSVGDRVSVTCKASQNVGTNVAWYQQKPGQSPKPLIYSATYRNSGVPDRFTGSGSGTDFTLTITNVQSKDLADYFCQYNRYPYTSFFFTKLEIKRRS

SEQ ID NO: 418 - protein, 464 aa, Artificial Sequence
  source: /note="Description of Artificial Sequence: Synthetic polypeptide"
QVQLLESGAELVRPGSSVKISCKASGYAFSSYWMNWVKQRPGQGLEWIGQIYPGDGDTNYNGKFKGQATLTADKSSSTAYMQLSGLTSEDSAVYSCARKTISSVVDFYFDYWGQGTTVTGGGSGGGSGGGSGGGSELVLTQSPKFMSTSVGDRVSVTCKASQNVGTNVAWYQQKPGQSPKPLIYSATYRNSGVPDRFTGSGSGTDFTLTITNVQSKDLADYFCQYNRYPYTSFFFTKLEIKRRSKIEVMYPPPYLDNEKSNGTIIHVKGKHLCPSPLFPGPSKPFWVLVVVGGVLACYSLLVTVAFIIFWVRSKRSRLLHSDYMFMTPRRPGPTRKHYQPYAPPRDFAAYRSRVKFSRSADAPAYQQGQNQLYNELNLGRREEYDVLDKRRGRDPEMGGKPRRKNPQEGLYNELQKDKMAEAYSEIGMKGERRRGKGHDGLYQGLSTATKDTYDALHMQALPPR

SEQ ID NO: 419 - protein, 464 aa, Artificial Sequence
  source: /note="Description of Artificial Sequence: Synthetic polypeptide"
QVQLLESGAELVRPGSSVKISCKASGYAFSSYWMNWVKQRPGQGLEWIGQIYPGDGDTNYNGKFKGQATLTADKSSSTAYMQLSGLTSEDSAVYSCARKTISSVVDFYFDYWGQGTTVTGGGSGGGSGGGSGGGSELVLTQSPKFMSTSVGDRVSVTCKASQNVGTNVAWYQQKPGQSPKPLIYSATYRNSGVPDRFTGSGSGTDFTLTITNVQSKDLADYFCQYNRYPYTSFFFTKLEIKRRSKIEVMYPPPYLDNEKSNGTIIHVKGKHLCPSPLFPGPSKPFWVLVVVGGVLACYSLLVTVAFIIFWVRSKRSRLLHSDFMNMTPRRPGPTRKHYQPYAPPRDFAAYRSRVKFSRSADAPAYQQGQNQLYNELNLGRREEYDVLDKRRGRDPEMGGKPRRKNPQEGLYNELQKDKMAEAYSEIGMKGERRRGKGHDGLYQGLSTATKDTYDALHMQALPPR

SEQ ID NO: 420 - protein, 464 aa, Artificial Sequence
  source: /note="Description of Artificial Sequence: Synthetic polypeptide"
QVQLLESGAELVRPGSSVKISCKASGYAFSSYWMNWVKQRPGQGLEWIGQIYPGDGDTNYNGKFKGQATLTADKSSSTAYMQLSGLTSEDSAVYSCARKTISSVVDFYFDYWGQGTTVTGGGSGGGSGGGSGGGSELVLTQSPKFMSTSVGDRVSVTCKASQNVGTNVAWYQQKPGQSPKPLIYSATYRNSGVPDRFTGSGSGTDFTLTITNVQSKDLADYFCQYNRYPYTSFFFTKLEIKRRSKIEVMYPPPYLDNEKSNGTIIHVKGKHLCPSPLFPGPSKPFWVLVVVGGVLACYSLLVTVAFIIFWVRSKRSRLLHSDFMFMTPRRPGPTRKHYQPYAPPRDFAAYRSRVKFSRSADAPAYQQGQNQLYNELNLGRREEYDVLDKRRGRDPEMGGKPRRKNPQEGLYNELQKDKMAEAYSEIGMKGERRRGKGHDGLYQGLSTATKDTYDALHMQALPPR

SEQ ID NO: 421 - protein, 107 aa, Artificial Sequence; identical to SEQ ID NO: 409
  source: /note="Description of Artificial Sequence: Synthetic polypeptide"

SEQ ID NO: 422 - protein, 121 aa, Artificial Sequence
  source: /note="Description of Artificial Sequence: Synthetic polypeptide"
EVKLQESGPGLVAPSQSLSVTCTVSGVSLPDYGVSWIRQPPRKGLEWLGVIWGSETTYYNSALKSRLTIIKDNSKSQVFLKMNSLQTDDTAIYYCAKHYYYGGSYAMDYWGQGTSVTVSSE

SEQ ID NO: 423 - protein, 246 aa, Artificial Sequence
  source: /note="Description of Artificial Sequence: Synthetic polypeptide"
DIQMTQTTSSLSASLGDRVTISCRASQDISKYLNWYQQKPDGTVKLLIYHTSRLHSGVPSRFSGSGSGTDYSLTISNLEQEDIATYFCQQGNTLPYTFGGGTKLEITGSTSGSGKPGSGEGSTKGEVKLQESGPGLVAPSQSLSVTCTVSGVSLPDYGVSWIRQPPRKGLEWLGVIWGSETTYYNSALKSRLTIIKDNSKSQVFLKMNSLQTDDTAIYYCAKHYYYGGSYAMDYWGQGTSVTVSSE

SEQ ID NO: 424 - protein, 111 aa, Artificial Sequence
  source: /note="Description of Artificial Sequence: Synthetic polypeptide"
DIVLTQSPPSLAMSLGKRATISCRASESVTILGSHLIHWYQQKPGQPPTLLIQLASNVQTGVPARFSGSGSRTDFTLTIDPVEEDDVAVYYCLQSRTIPRTFGGGTKLEIK

SEQ ID NO: 425 - protein, 117 aa, Artificial Sequence
  source: /note="Description of Artificial Sequence: Synthetic polypeptide"
QIQLVQSGPELKKPGETVKISCKASGYTFTDYSINWVKRAPGKGLKWMGWINTETREPAYAYDFRGRFAFSLETSASTAYLQINNLKYEDTATYFCALDYSYAMDYWGQGTSVTVSS

SEQ ID NO: 426 - protein, 246 aa, Artificial Sequence
  source: /note="Description of Artificial Sequence: Synthetic polypeptide"
DIVLTQSPPSLAMSLGKRATISCRASESVTILGSHLIHWYQQKPGQPPTLLIQLASNVQTGVPARFSGSGSRTDFTLTIDPVEEDDVAVYYCLQSRTIPRTFGGGTKLEIKGSTSGSGKPGSGEGSTKGQIQLVQSGPELKKPGETVKISCKASGYTFTDYSINWVKRAPGKGLKWMGWINTETREPAYAYDFRGRFAFSLETSASTAYLQINNLKYEDTATYFCALDYSYAMDYWGQGTSVTVSS

SEQ ID NO: 427 - protein, 41 aa, Artificial Sequence
  source: /note="Description of Artificial Sequence: Synthetic polypeptide"
  MOD_RES (12)..(12): Any amino acid
  MOD_RES (14)..(14): Any amino acid
RSKRSRLLHSDXMXMTPRRPGPTRKHYQPYAPPRDFAAYRS

SEQ ID NO: 428 - protein, 41 aa, Artificial Sequence
  source: /note="Description of Artificial Sequence: Synthetic polypeptide"
RSKRSRLLHSDYMFMTPRRPGPTRKHYQPYAPPRDFAAYRS

SEQ ID NO: 429 - protein, 41 aa, Artificial Sequence
  source: /note="Description of Artificial Sequence: Synthetic polypeptide"
RSKRSRLLHSDFMNMTPRRPGPTRKHYQPYAPPRDFAAYRS

SEQ ID NO: 430 - protein, 41 aa, Artificial Sequence
  source: /note="Description of Artificial Sequence: Synthetic polypeptide"
RSKRSRLLHSDFMFMTPRRPGPTRKHYQPYAPPRDFAAYRS

SEQ ID NO: 431 - protein, 244 aa, Artificial Sequence
  source: /note="Description of Artificial Sequence: Synthetic polypeptide"
QVQLQQSGAEVKKPGASVKVSCKASGYTFTGYYMHWVRQAPGQGLEWMGRINPNSGGTNYAQKFQGRVTMTRDTSISTAYMELSRLRSEDTAVYYCARGRYYGMDVWGQGTMVTVSSGGGGSGGGGSGGGGSGGGGSEIVLTQSPATLSLSPGERATISCRASQSVSSNFAWYQQRPGQAPRLLIYDASNRATGIPPRFSGSGSGTDFTLTISSLEPEDFAAYYCHQRSNWLYTFGQGTKVDIK

SEQ ID NO: 432 - protein, 488 aa, Artificial Sequence
  source: /note="Description of Artificial Sequence: Synthetic polypeptide"
MALPVTALLLPLALLLHAARPQVQLQQSGAEVKKPGASVKVSCKASGYTFTGYYMHWVRQAPGQGLEWMGRINPNSGGTNYAQKFQGRVTMTRDTSISTAYMELSRLRSEDTAVYYCARGRYYGMDVWGQGTMVTVSSGGGGSGGGGSGGGGSGGGGSEIVLTQSPATLSLSPGERATISCRASQSVSSNFAWYQQRPGQAPRLLIYDASNRATGIPPRFSGSGSGTDFTLTISSLEPEDFAAYYCHQRSNWLYTFGQGTKVDIKTTTPAPRPPTPAPTIASQPLSLRPEACRPAAGGAVHTRGLDFACDIYIWAPLAGTCGVLLLSLVITLYCKRGRKKLLYIFKQPFMRPVQTTQEEDGCSCRFPEEEEGGCELRVKFSRSADAPAYKQGQNQLYNELNLGRREEYDVLDKRRGRDPEMGGKPRRKNPQEGLYNELQKDKMAEAYSEIGMKGERRRGKGHDGLYQGLSTATKDTYDALHMQALPPR

SEQ ID NO: 433 - protein, 253 aa, Artificial Sequence
  source: /note="Description of Artificial Sequence: Synthetic polypeptide"
QVQLVQSGAEVKKPGASVKVSCKASGYTFTGYYMHWVRQAPGQGLEWMGWINPNSGGTNYAQKFQGRVTMTRDTSISTAYMELSRLRSDDTAVYYCARDLRRTVVTPRAYYGMDVWGQGTTVTVSSGGGGSGGGGSGGGGSGGGGSDIQLTQSPSTLSASVGDRVTITCQASQDISNSLNWYQQKAGKAPKLLIYDASTLETGVPSRFSGSGSGTDFSFTISSLQPEDIATYYCQQHDNLPLTFGQGTKVEIK

SEQ ID NO: 434 - protein, 497 aa, Artificial Sequence
  source: /note="Description of Artificial Sequence: Synthetic polypeptide"
MALPVTALLLPLALLLHAARPQVQLVQSGAEVKKPGASVKVSCKASGYTFTGYYMHWVRQAPGQGLEWMGWINPNSGGTNYAQKFQGRVTMTRDTSISTAYMELSRLRSDDTAVYYCARDLRRTVVTPRAYYGMDVWGQGTTVTVSSGGGGSGGGGSGGGGSGGGGSDIQLTQSPSTLSASVGDRVTITCQASQDISNSLNWYQQKAGKAPKLLIYDASTLETGVPSRFSGSGSGTDFSFTISSLQPEDIATYYCQQHDNLPLTFGQGTKVEIKTTTPAPRPPTPAPTIASQPLSLRPEACRPAAGGAVHTRGLDFACDIYIWAPLAGTCGVLLLSLVITLYCKRGRKKLLYIFKQPFMRPVQTTQEEDGCSCRFPEEEEGGCELRVKFSRSADAPAYKQGQNQLYNELNLGRREEYDVLDKRRGRDPEMGGKPRRKNPQEGLYNELQKDKMAEAYSEIGMKGERRRGKGHDGLYQGLSTATKDTYDALHMQALPPR

SEQ ID NO: 435 - protein, 246 aa, Artificial Sequence
  source: /note="Description of Artificial Sequence: Synthetic polypeptide"
QVQLVQSGAEVKKPGAPVKVSCKASGYTFTGYYMHWVRQAPGQGLEWMGWINPNSGGTNYAQKFQGRVTMTRDTSISTAYMELSRLRSDDTAVYYCARGEWDGSYYYDYWGQGTLVTVSSGGGGSGGGGSGGGGSGGGGSDIVLTQTPSSLSASVGDRVTITCRASQSINTYLNWYQHKPGKAPKLLIYAASSLQSGVPSRFSGSGSGTDFTLTISSLQPEDFATYYCQQSFSPLTFGGGTKLEIK

SEQ ID NO: 436 - protein, 490 aa, Artificial Sequence
  source: /note="Description of Artificial Sequence: Synthetic polypeptide"
MALPVTALLLPLALLLHAARPQVQLVQSGAEVKKPGAPVKVSCKASGYTFTGYYMHWVRQAPGQGLEWMGWINPNSGGTNYAQKFQGRVTMTRDTSISTAYMELSRLRSDDTAVYYCARGEWDGSYYYDYWGQGTLVTVSSGGGGSGGGGSGGGGSGGGGSDIVLTQTPSSLSASVGDRVTITCRASQSINTYLNWYQHKPGKAPKLLIYAASSLQSGVPSRFSGSGSGTDFTLTISSLQPEDFATYYCQQSFSPLTFGGGTKLEIKTTTPAPRPPTPAPTIASQPLSLRPEACRPAAGGAVHTRGLDFACDIYIWAPLAGTCGVLLLSLVITLYCKRGRKKLLYIFKQPFMRPVQTTQEEDGCSCRFPEEEEGGCELRVKFSRSADAPAYKQGQNQLYNELNLGRREEYDVLDKRRGRDPEMGGKPRRKNPQEGLYNELQKDKMAEAYSEIGMKGERRRGKGHDGLYQGLSTATKDTYDALHMQALPPR

SEQ ID NO: 437 - protein, 242 aa, Artificial Sequence
  source: /note="Description of Artificial Sequence: Synthetic polypeptide"
QVQLVESGGGLVQPGGSLRLSCAASGFTFSSYWMHWVRQVPGKGLVWVSRINTDGSTTTYADSVEGRFTISRDNAKNTLYLQMNSLRDDDTAVYYCVGGHWAVWGQGTTVTVSSGGGGSGGGGSGGGGSGGGGSDIQMTQSPSTLSASVGDRVTITCRASQSISDRLAWYQQKPGKAPKLLIYKASSLESGVPSRFSGSGSGTEFTLTISSLQPDDFAVYYCQQYGHLPMYTFGQGTKVEIK

SEQ ID NO: 438 - protein, 486 aa, Artificial Sequence
  source: /note="Description of Artificial Sequence: Synthetic polypeptide"
MALPVTALLLPLALLLHAARPQVQLVESGGGLVQPGGSLRLSCAASGFTFSSYWMHWVRQVPGKGLVWVSRINTDGSTTTYADSVEGRFTISRDNAKNTLYLQMNSLRDDDTAVYYCVGGHWAVWGQGTTVTVSSGGGGSGGGGSGGGGSGGGGSDIQMTQSPSTLSASVGDRVTITCRASQSISDRLAWYQQKPGKAPKLLIYKASSLESGVPSRFSGSGSGTEFTLTISSLQPDDFAVYYCQQYGHLPMYTFGQGTKVEIKTTTPAPRPPTPAPTIASQPLSLRPEACRPAAGGAVHTRGLDFACDIYIWAPLAGTCGVLLLSLVITLYCKRGRKKLLYIFKQPFMRPVQTTQEEDGCSCRFPEEEEGGCELRVKFSRSADAPAYKQGQNQLYNELNLGRREEYDVLDKRRGRDPEMGGKPRRKNPQEGLYNELQKDKMAEAYSEIGMKGERRRGKGHDGLYQGLSTATKDTYDALHMQALPPR

SEQ ID NO: 439 - protein, 241 aa, Artificial Sequence
  source: /note="Description of Artificial Sequence: Synthetic polypeptide"
QVQLVQSGAEVEKPGASVKVSCKASGYTFTDYYMHWVRQAPGQGLEWMGWINPNSGGTNYAQKFQGRVTMTRDTSISTAYMELSRLRSDDTAVYYCASGWDFDYWGQGTLVTVSSGGGGSGGGGSGGGGSGGGGSDIVMTQSPSSLSASVGDRVTITCRASQSIRYYLSWYQQKPGKAPKLLIYTASILQNGVPSRFSGSGSGTDFTLTISSLQPEDFATYYCLQTYTTPDFGPGTKVEIK

SEQ ID NO: 440 - protein, 485 aa, Artificial Sequence
  source: /note="Description of Artificial Sequence: Synthetic polypeptide"
MALPVTALLLPLALLLHAARPQVQLVQSGAEVEKPGASVKVSCKASGYTFTDYYMHWVRQAPGQGLEWMGWINPNSGGTNYAQKFQGRVTMTRDTSISTAYMELSRLRSDDTAVYYCASGWDFDYWGQGTLVTVSSGGGGSGGGGSGGGGSGGGGSDIVMTQSPSSLSASVGDRVTITCRASQSIRYYLSWYQQKPGKAPKLLIYTASILQNGVPSRFSGSGSGTDFTLTISSLQPEDFATYYCLQTYTTPDFGPGTKVEIKTTTPAPRPPTPAPTIASQPLSLRPEACRPAAGGAVHTRGLDFACDIYIWAPLAGTCGVLLLSLVITLYCKRGRKKLLYIFKQPFMRPVQTTQEEDGCSCRFPEEEEGGCELRVKFSRSADAPAYKQGQNQLYNELNLGRREEYDVLDKRRGRDPEMGGKPRRKNPQEGLYNELQKDKMAEAYSEIGMKGERRRGKGHDGLYQGLSTATKDTYDALHMQALPPR

SEQ ID NO: 441 - protein, 253 aa, Artificial Sequence
  source: /note="Description of Artificial Sequence: Synthetic polypeptide"
QVQLVQSGAEVKKPGASVKVSCKASGYTFTSYYMHWVRQAPGQGLEWMGIINPSGGSTSYAQKFQGRVTMTRDTSTSTVYMELSSLRSEDTAVYYCARYRLIAVAGDYYYYGMDVWGQGTMVTVSSGGGGSGGGGSGGGGSGGGGSDIQMTQSPSSVSASVGDRVTITCRASQGVGRWLAWYQQKPGTAPKLLIYAASTLQSGVPSRFSGSGSGTDFTLTINNLQPEDFATYYCQQANSFPLTFGGGTRLEIK

SEQ ID NO: 442 - protein, 497 aa, Artificial Sequence
  source: /note="Description of Artificial Sequence: Synthetic polypeptide"
MALPVTALLLPLALLLHAARPQVQLVQSGAEVKKPGASVKVSCKASGYTFTSYYMHWVRQAPGQGLEWMGIINPSGGSTSYAQKFQGRVTMTRDTSTSTVYMELSSLRSEDTAVYYCARYRLIAVAGDYYYYGMDVWGQGTMVTVSSGGGGSGGGGSGGGGSGGGGSDIQMTQSPSSVSASVGDRVTITCRASQGVGRWLAWYQQKPGTAPKLLIYAASTLQSGVPSRFSGSGSGTDFTLTINNLQPEDFATYYCQQANSFPLTFGGGTRLEIKTTTPAPRPPTPAPTIASQPLSLRPEACRPAAGGAVHTRGLDFACDIYIWAPLAGTCGVLLLSLVITLYCKRGRKKLLYIFKQPFMRPVQTTQEEDGCSCRFPEEEEGGCELRVKFSRSADAPAYKQGQNQLYNELNLGRREEYDVLDKRRGRDPEMGGKPRRKNPQEGLYNELQKDKMAEAYSEIGMKGERRRGKGHDGLYQGLSTATKDTYDALHMQALPPR

SEQ ID NO: 443 - protein, 250 aa, Artificial Sequence
  source: /note="Description of Artificial Sequence: Synthetic polypeptide"
QVQLVQSGGGVVQPGRSLRLSCAASGFTFSSYAMHWVRQAPGKGLEWVAVISYDGSNKYYADSVKGRFTISRDNSKNTLYLQMNSLRAEDTAVYYCARWKVSSSSPAFDYWGQGTLVTVSSGGGGSGGGGSGGGGSGGGGSEIVLTQSPATLSLSPGERAILSCRASQSVYTKYLGWYQQKPGQAPRLLIYDASTRATGIPDRFSGSGSGTDFTLTINRLEPEDFAVYYCQHYGGSPLITFGQGTRLEIK

SEQ ID NO: 444 - protein, 494 aa, Artificial Sequence
  source: /note="Description of Artificial Sequence: Synthetic polypeptide"
MALPVTALLLPLALLLHAARPQVQLVQSGGGVVQPGRSLRLSCAASGFTFSSYAMHWVRQAPGKGLEWVAVISYDGSNKYYADSVKGRFTISRDNSKNTLYLQMNSLRAEDTAVYYCARWKVSSSSPAFDYWGQGTLVTVSSGGGGSGGGGSGGGGSGGGGSEIVLTQSPATLSLSPGERAILSCRASQSVYTKYLGWYQQKPGQAPRLLIYDASTRATGIPDRFSGSGSGTDFTLTINRLEPEDFAVYYCQHYGGSPLITFGQGTRLEIKTTTPAPRPPTPAPTIASQPLSLRPEACRPAAGGAVHTRGLDFACDIYIWAPLAGTCGVLLLSLVITLYCKRGRKKLLYIFKQPFMRPVQTTQEEDGCSCRFPEEEEGGCELRVKFSRSADAPAYKQGQNQLYNELNLGRREEYDVLDKRRGRDPEMGGKPRRKNPQEGLYNELQKDKMAEAYSEIGMKGERRRGKGHDGLYQGLSTATKDTYDALHMQALPPR

SEQ ID NO: 445 - protein, 246 aa, Artificial Sequence
  source: /note="Description of Artificial Sequence: Synthetic polypeptide"
QVQLQQSGAEVKKPGASVKVSCKTSGYPFTGYSLHWVRQAPGQGLEWMGWINPNSGGTNYAQKFQGRVTMTRDTSISTAYMELSRLRSDDTAVYYCARDHYGGNSLFYWGQGTLVTVSSGGGGSGGGGSGGGGSGGGGSDIQLTQSPSSISASVGDTVSITCRASQDSGTWLAWYQQKPGKAPNLLMYDASTLEDGVPSRFSGSASGTEFTLTVNRLQPEDSATYYCQQYNSYPLTFGGGTKVDIK

SEQ ID NO: 446 - protein, 490 aa, Artificial Sequence
  source: /note="Description of Artificial Sequence: Synthetic polypeptide"
MALPVTALLLPLALLLHAARPQVQLQQSGAEVKKPGASVKVSCKTSGYPFTGYSLHWVRQAPGQGLEWMGWINPNSGGTNYAQKFQGRVTMTRDTSISTAYMELSRLRSDDTAVYYCARDHYGGNSLFYWGQGTLVTVSSGGGGSGGGGSGGGGSGGGGSDIQLTQSPSSISASVGDTVSITCRASQDSGTWLAWYQQKPGKAPNLLMYDASTLEDGVPSRFSGSASGTEFTLTVNRLQPEDSATYYCQQYNSYPLTFGGGTKVDIKTTTPAPRPPTPAPTIASQPLSLRPEACRPAAGGAVHTRGLDFACDIYIWAPLAGTCGVLLLSLVITLYCKRGRKKLLYIFKQPFMRPVQTTQEEDGCSCRFPEEEEGGCELRVKFSRSADAPAYKQGQNQLYNELNLGRREEYDVLDKRRGRDPEMGGKPRRKNPQEGLYNELQKDKMAEAYSEIGMKGERRRGKGHDGLYQGLSTATKDTYDALHMQALPPR

SEQ ID NO: 447 - protein, 248 aa, Artificial Sequence
  source: /note="Description of Artificial Sequence: Synthetic polypeptide"
QVQLVQSGAEVKKPGASVEVSCKASGYTFTSYYMHWVRQAPGQGLEWMGIINPSGGSTGYAQKFQGRVTMTRDTSTSTVHMELSSLRSEDTAVYYCARGGYSSSSDAFDIWGQGTMVTVSSGGGGSGGGGSGGGGSGGGGSDIQMTQSPPSLSASVGDRVTITCRASQDISSALAWYQQKPGTPPKLLIYDASSLESGVPSRFSGSGSGTDFTLTISSLQPEDFATYYCQQFSSYPLTFGGGTRLEIK

SEQ ID NO: 448 - protein, 492 aa, Artificial Sequence
  source: /note="Description of Artificial Sequence: Synthetic polypeptide"
MALPVTALLLPLALLLHAARPQVQLVQSGAEVKKPGASVEVSCKASGYTFTSYYMHWVRQAPGQGLEWMGIINPSGGSTGYAQKFQGRVTMTRDTSTSTVHMELSSLRSEDTAVYYCARGGYSSSSDAFDIWGQGTMVTVSSGGGGSGGGGSGGGGSGGGGSDIQMTQSPPSLSASVGDRVTITCRASQDISSALAWYQQKPGTPPKLLIYDASSLESGVPSRFSGSGSGTDFTLTISSLQPEDFATYYCQQFSSYPLTFGGGTRLEIKTTTPAPRPPTPAPTIASQPLSLRPEACRPAAGGAVHTRGLDFACDIYIWAPLAGTCGVLLLSLVITLYCKRGRKKLLYIFKQPFMRPVQTTQEEDGCSCRFPEEEEGGCELRVKFSRSADAPAYKQGQNQLYNELNLGRREEYDVLDKRRGRDPEMGGKPRRKNPQEGLYNELQKDKMAEAYSEIGMKGERRRGKGHDGLYQGLSTATKDTYDALHMQALPPR

SEQ ID NO: 449 - protein, 255 aa, Artificial Sequence
  source: /note="Description of Artificial Sequence: Synthetic polypeptide"
QVQLVQSGAEVKKPGASVKVSCKASGYTFTSYGISWVRQAPGQGLEWMGWISAYNGNTNYAQKLQGRVTMTTDTSTSTAYMELRSLRSDDTAVYYCARVAGGIYYYYGMDVWGQGTTITVSSGGGGSGGGGSGGGGSGGGGSDIVMTQTPDSLAVSLGERATISCKSSHSVLYNRNNKNYLAWYQQKPGQPPKLLFYWASTRKSGVPDRFSGSGSGTDFTLTISSLQPEDFATYFCQQTQTFPLTFGQGTRLEIN

SEQ ID NO: 450 - protein, 499 aa, Artificial Sequence
  source: /note="Description of Artificial Sequence: Synthetic polypeptide"
MALPVTALLLPLALLLHAARPQVQLVQSGAEVKKPGASVKVSCKASGYTFTSYGISWVRQAPGQGLEWMGWISAYNGNTNYAQKLQGRVTMTTDTSTSTAYMELRSLRSDDTAVYYCARVAGGIYYYYGMDVWGQGTTITVSSGGGGSGGGGSGGGGSGGGGSDIVMTQTPDSLAVSLGERATISCKSSHSVLYNRNNKNYLAWYQQKPGQPPKLLFYWASTRKSGVPDRFSGSGSGTDFTLTISSLQPEDFATYFCQQTQTFPLTFGQGTRLEINTTTPAPRPPTPAPTIASQPLSLRPEACRPAAGGAVHTRGLDFACDIYIWAPLAGTCGVLLLSLVITLYCKRGRKKLLYIFKQPFMRPVQTTQEEDGCSCRFPEEEEGGCELRVKFSRSADAPAYKQGQNQLYNELNLGRREEYDVLDKRRGRDPEMGGKPRRKNPQEGLYNELQKDKMAEAYSEIGMKGERRRGKGHDGLYQGLSTATKDTYDALHMQALPPR

SEQ ID NO: 451 - protein, 241 aa, Artificial Sequence
  source: /note="Description of Artificial Sequence: Synthetic polypeptide"
QVQLQQSGAEVKKPGASVKVSCKASGYTFTGYYMHWVRQAPGQGLEWMGWINPNSGGTNYAQNFQGRVTMTRDTSISTAYMELRRLRSDDTAVYYCASGWDFDYWGQGTLVTVSSGGGGSGGGGSGGGGSGGGGSDIRMTQSPSSLSASVGDRVTITCRASQSIRYYLSWYQQKPGKAPKLLIYTASILQNGVPSRFSGSGSGTDFTLTISSLQPEDFATYYCLQTYTTPDFGPGTKVEIK

SEQ ID NO: 452 - protein, 485 aa, Artificial Sequence
  source: /note="Description of Artificial Sequence: Synthetic polypeptide"
MALPVTALLLPLALLLHAARPQVQLQQSGAEVKKPGASVKVSCKASGYTFTGYYMHWVRQAPGQGLEWMGWINPNSGGTNYAQNFQGRVTMTRDTSISTAYMELRRLRSDDTAVYYCASGWDFDYWGQGTLVTVSSGGGGSGGGGSGGGGSGGGGSDIRMTQSPSSLSASVGDRVTITCRASQSIRYYLSWYQQKPGKAPKLLIYTASILQNGVPSRFSGSGSGTDFTLTISSLQPEDFATYYCLQTYTTPDFGPGTKVEIKTTTPAPRPPTPAPTIASQPLSLRPEACRPAAGGAVHTRGLDFACDIYIWAPLAGTCGVLLLSLVITLYCKRGRKKLLYIFKQPFMRPVQTTQEEDGCSCRFPEEEEGGCELRVKFSRSADAPAYKQGQNQLYNELNLGRREEYDVLDKRRGRDPEMGGKPRRKNPQEGLYNELQKDKMAEAYSEIGMKGERRRGKGHDGLYQGLSTATKDTYDALHMQALPPR

SEQ ID NO: 453 - protein, 246 aa, Artificial Sequence
  source: /note="Description of Artificial Sequence: Synthetic polypeptide"
QVQLVQSGAEVKKPGASVKVSCKASGYTFTGYYMHWVRQAPGQGLEWMGRINPNSGGTNYAQKFQGRVTMTTDTSTSTAYMELRSLRSDDTAVYYCARTTTSYAFDIWGQGTMVTVSSGGGGSGGGGSGGGGSGGGGSDIQLTQSPSTLSASVGDRVTITCRASQSISTWLAWYQQKPGKAPNLLIYKASTLESGVPSRFSGSGSGTEFTLTISSLQPDDFATYYCQQYNTYSPYTFGQGTKLEIK

SEQ ID NO: 454 - protein, 490 aa, Artificial Sequence
  source: /note="Description of Artificial Sequence: Synthetic polypeptide"
MALPVTALLLPLALLLHAARPQVQLVQSGAEVKKPGASVKVSCKASGYTFTGYYMHWVRQAPGQGLEWMGRINPNSGGTNYAQKFQGRVTMTTDTSTSTAYMELRSLRSDDTAVYYCARTTTSYAFDIWGQGTMVTVSSGGGGSGGGGSGGGGSGGGGSDIQLTQSPSTLSASVGDRVTITCRASQSISTWLAWYQQKPGKAPNLLIYKASTLESGVPSRFSGSGSGTEFTLTISSLQPDDFATYYCQQYNTYSPYTFGQGTKLEIKTTTPAPRPPTPAPTIASQPLSLRPEACRPAAGGAVHTRGLDFACDIYIWAPLAGTCGVLLLSLVITLYCKRGRKKLLYIFKQPFMRPVQTTQEEDGCSCRFPEEEEGGCELRVKFSRSADAPAYKQGQNQLYNELNLGRREEYDVLDKRRGRDPEMGGKPRRKNPQEGLYNELQKDKMAEAYSEIGMKGERRRGKGHDGLYQGLSTATKDTYDALHMQALPPR

SEQ ID NO: 455 - protein, 249 aa, Artificial Sequence
  source: /note="Description of Artificial Sequence: Synthetic polypeptide"
QVQLVQSGGGLVKPGGSLRLSCEASGFIFSDYYMGWIRQAPGKGLEWVSYIGRSGSSMYYADSVKGRFTFSRDNAKNSLYLQMNSLRAEDTAVYYCAASPVVAATEDFQHWGQGTLVTVSSGGGGSGGGGSGGGGSGGGGSDIVMTQTPATLSLSPGERATLSCRASQSVTSNYLAWYQQKPGQAPRLLLFGASTRATGIPDRFSGSGSGTDFTLTINRLEPEDFAMYYCQQYGSAPVTFGQGTKLEIK

SEQ ID NO: 456 - protein, 493 aa, Artificial Sequence
  source: /note="Description of Artificial Sequence: Synthetic polypeptide"
MALPVTALLLPLALLLHAARPQVQLVQSGGGLVKPGGSLRLSCEASGFIFSDYYMGWIRQAPGKGLEWVSYIGRSGSSMYYADSVKGRFTFSRDNAKNSLYLQMNSLRAEDTAVYYCAASPVVAATEDFQHWGQGTLVTVSSGGGGSGGGGSGGGGSGGGGSDIVMTQTPATLSLSPGERATLSCRASQSVTSNYLAWYQQKPGQAPRLLLFGASTRATGIPDRFSGSGSGTDFTLTINRLEPEDFAMYYCQQYGSAPVTFGQGTKLEIKTTTPAPRPPTPAPTIASQPLSLRPEACRPAAGGAVHTRGLDFACDIYIWAPLAGTCGVLLLSLVITLYCKRGRKKLLYIFKQPFMRPVQTTQEEDGCSCRFPEEEEGGCELRVKFSRSADAPAYKQGQNQLYNELNLGRREEYDVLDKRRGRDPEMGGKPRRKNPQEGLYNELQKDKMAEAYSEIGMKGERRRGKGHDGLYQGLSTATKDTYDALHMQALPPR

SEQ ID NO: 457 - protein, 249 aa, Artificial Sequence
  source: /note="Description of Artificial Sequence: Synthetic polypeptide"
QVQLVQSGAEVRAPGASVKISCKASGFTFRGYYIHWVRQAPGQGLEWMGIINPSGGSRAYAQKFQGRVTMTRDTSTSTVYMELSSLRSDDTAMYYCARTASCGGDCYYLDYWGQGTLVTVSSGGGGSGGGGSGGGGSGGGGSDIQMTQSPPTLSASVGDRVTITCRASENVNIWLAWYQQKPGKAPKLLIYKSSSLASGVPSRFSGSGSGAEFTLTISSLQPDDFATYYCQQYQSYPLTFGGGTKVDIK

SEQ ID NO: 458 - protein, 493 aa, Artificial Sequence
  source: /note="Description of Artificial Sequence: Synthetic polypeptide"
MALPVTALLLPLALLLHAARPQVQLVQSGAEVRAPGASVKISCKASGFTFRGYYIHWVRQAPGQGLEWMGIINPSGGSRAYAQKFQGRVTMTRDTSTSTVYMELSSLRSDDTAMYYCARTASCGGDCYYLDYWGQGTLVTVSSGGGGSGGGGSGGGGSGGGGSDIQMTQSPPTLSASVGDRVTITCRASENVNIWLAWYQQKPGKAPKLLIYKSSSLASGVPSRFSGSGSGAEFTLTISSLQPDDFATYYCQQYQSYPLTFGGGTKVDIKTTTPAPRPPTPAPTIASQPLSLRPEACRPAAGGAVHTRGLDFACDIYIWAPLAGTCGVLLLSLVITLYCKRGRKKLLYIFKQPFMRPVQTTQEEDGCSCRFPEEEEGGCELRVKFSRSADAPAYKQGQNQLYNELNLGRREEYDVLDKRRGRDPEMGGKPRRKNPQEGLYNELQKDKMAEAYSEIGMKGERRRGKGHDGLYQGLSTATKDTYDALHMQALPPR

SEQ ID NO: 459 - protein, 244 aa, Artificial Sequence
  source: /note="Description of Artificial Sequence: Synthetic polypeptide"
QVQLVQSGGGLVQPGRSLRLSCAASGFTFDDYAMHWVRQAPGKGLEWVSGISWNSGSIGYADSVKGRFTISRDNAKNSLYLQMNSLRAEDTAVYYCAKDGSSSWSWGYFDYWGQGTLVTVSSGGGGSGGGGSGGGGSSSELTQDPAVSVALGQTVRTTCQGDALRSYYASWYQQKPGQAPMLVIYGKNNRPSGIPDRFSGSDSGDTASLTITGAQAEDEADYYCNSRDSSGYPVFGTGTKVTVL

SEQ ID NO: 460 - protein, 488 aa, Artificial Sequence
  source: /note="Description of Artificial Sequence: Synthetic polypeptide"
MALPVTALLLPLALLLHAARPQVQLVQSGGGLVQPGRSLRLSCAASGFTFDDYAMHWVRQAPGKGLEWVSGISWNSGSIGYADSVKGRFTISRDNAKNSLYLQMNSLRAEDTAVYYCAKDGSSSWSWGYFDYWGQGTLVTVSSGGGGSGGGGSGGGGSSSELTQDPAVSVALGQTVRTTCQGDALRSYYASWYQQKPGQAPMLVIYGKNNRPSGIPDRFSGSDSGDTASLTITGAQAEDEADYYCNSRDSSGYPVFGTGTKVTVLTTTPAPRPPTPAPTIASQPLSLRPEACRPAAGGAVHTRGLDFACDIYIWAPLAGTCGVLLLSLVITLYCKRGRKKLLYIFKQPFMRPVQTTQEEDGCSCRFPEEEEGGCELRVKFSRSADAPAYKQGQNQLYNELNLGRREEYDVLDKRRGRDPEMGGKPRRKNPQEGLYNELQKDKMAEAYSEIGMKGERRRGKGHDGLYQGLSTATKDTYDALHMQALPPR

SEQ ID NO: 461 - protein, 246 aa, Artificial Sequence
  source: /note="Description of Artificial Sequence: Synthetic polypeptide"
EVQLVESGGGLVQPGRSLRLSCAASGFTFDDYAMHWVRQAPGKGLEWVSGISWNSGSTGYADSVKGRFTISRDNAKNSLYLQMNSLRAEDTALYYCAKDSSSWYGGGSAFDIWGQGTMVTVSSGGGGSGGGGSGGGGSSSELTQEPAVSVALGQTVRITCQGDSLRSYYASWYQQKPGQAPVLVIFGRSRRPSGIPDRFSGSSSGNTASLIITGAQAEDEADYYCNSRDNTANHYVFGTGTKLTVL

SEQ ID NO: 462 - protein, 490 aa, Artificial Sequence
  source: /note="Description of Artificial Sequence: Synthetic polypeptide"
MALPVTALLLPLALLLHAARPEVQLVESGGGLVQPGRSLRLSCAASGFTFDDYAMHWVRQAPGKGLEWVSGISWNSGSTGYADSVKGRFTISRDNAKNSLYLQMNSLRAEDTALYYCAKDSSSWYGGGSAFDIWGQGTMVTVSSGGGGSGGGGSGGGGSSSELTQEPAVSVALGQTVRITCQGDSLRSYYASWYQQKPGQAPVLVIFGRSRRPSGIPDRFSGSSSGNTASLIITGAQAEDEADYYCNSRDNTANHYVFGTGTKLTVLTTTPAPRPPTPAPTIASQPLSLRPEACRPAAGGAVHTRGLDFACDIYIWAPLAGTCGVLLLSLVITLYCKRGRKKLLYIFKQPFMRPVQTTQEEDGCSCRFPEEEEGGCELRVKFSRSADAPAYKQGQNQLYNELNLGRREEYDVLDKRRGRDPEMGGKPRRKNPQEGLYNELQKDKMAEAYSEIGMKGERRRGKGHDGLYQGLSTATKDTYDALHMQALPPR

SEQ ID NO: 463 - protein, 246 aa, Artificial Sequence
  source: /note="Description of Artificial Sequence: Synthetic polypeptide"
EVQLVESGGGLVQPGRSLRLSCAASGFTFDDYAMHWVRQAPGKGLEWVSGISWNSGSTGYADSVKGRFTISRDNAKNSLYLQMNSLRAEDTALYYCAKDSSSWYGGGSAFDIWGQGTMVTVSSGGGGSGGGGSGGGGSSSELTQDPAVSVALGQTVRITCQGDSLRSYYASWYQQKPGQAPVLVIYGKNNRPSGIPDRFSGSSSGNTASLTITGAQAEDEADYYCNSRGSSGNHYVFGTGTKVTVL

SEQ ID NO: 464 - protein, 490 aa, Artificial Sequence
  source: /note="Description of Artificial Sequence: Synthetic polypeptide"
MALPVTALLLPLALLLHAARPEVQLVESGGGLVQPGRSLRLSCAASGFTFDDYAMHWVRQAPGKGLEWVSGISWNSGSTGYADSVKGRFTISRDNAKNSLYLQMNSLRAEDTALYYCAKDSSSWYGGGSAFDIWGQGTMVTVSSGGGGSGGGGSGGGGSSSELTQDPAVSVALGQTVRITCQGDSLRSYYASWYQQKPGQAPVLVIYGKNNRPSGIPDRFSGSSSGNTASLTITGAQAEDEADYYCNSRGSSGNHYVFGTGTKVTVLTTTPAPRPPTPAPTIASQPLSLRPEACRPAAGGAVHTRGLDFACDIYIWAPLAGTCGVLLLSLVITLYCKRGRKKLLYIFKQPFMRPVQTTQEEDGCSCRFPEEEEGGCELRVKFSRSADAPAYKQGQNQLYNELNLGRREEYDVLDKRRGRDPEMGGKPRRKNPQEGLYNELQKDKMAEAYSEIGMKGERRRGKGHDGLYQGLSTATKDTYDALHMQALPPR

SEQ ID NO: 465 - protein, 251 aa, Artificial Sequence
  source: /note="Description of Artificial Sequence: Synthetic polypeptide"
QVQLVQSGGGLVQPGGSLRLSCAASGFTFSSYWMHWVRQAPGKGLVWVSRINSDGSSTSYADSVKGRFTISRDNAKNTLYLQMNSLRAEDTAVYYCVRTGWVGSYYYYMDVWGKGTTVTVSSGGGGSGGGGSGGGGSGGGGSEIVLTQSPGTLSLSPGERATLSCRASQSVSSNYLAWYQQKPGQPPRLLIYDVSTRATGIPARFSGGGSGTDFTLTISSLEPEDFAVYYCQQRSNWPPWTFGQGTKVEIK

SEQ ID NO: 466 - protein, 495 aa, Artificial Sequence
  source: /note="Description of Artificial Sequence: Synthetic polypeptide"
MALPVTALLLPLALLLHAARPQVQLVQSGGGLVQPGGSLRLSCAASGFTFSSYWMHWVRQAPGKGLVWVSRINSDGSSTSYADSVKGRFTISRDNAKNTLYLQMNSLRAEDTAVYYCVRTGWVGSYYYYMDVWGKGTTVTVSSGGGGSGGGGSGGGGSGGGGSEIVLTQSPGTLSLSPGERATLSCRASQSVSSNYLAWYQQKPGQPPRLLIYDVSTRATGIPARFSGGGSGTDFTLTISSLEPEDFAVYYCQQRSNWPPWTFGQGTKVEIKTTTPAPRPPTPAPTIASQPLSLRPEACRPAAGGAVHTRGLDFACDIYIWAPLAGTCGVLLLSLVITLYCKRGRKKLLYIFKQPFMRPVQTTQEEDGCSCRFPEEEEGGCELRVKFSRSADAPAYKQGQNQLYNELNLGRREEYDVLDKRRGRDPEMGGKPRRKNPQEGLYNELQKDKMAEAYSEIGMKGERRRGKGHDGLYQGLSTATKDTYDALHMQALPPR

SEQ ID NO: 467 - protein, 250 aa, Artificial Sequence
  source: /note="Description of Artificial Sequence: Synthetic polypeptide"
QVQLVQSGGGVVQPGRSLRLSCAASGFTFSSYGMHWVRQAPGKGLEWVAVISYDGSNKYYADSVKGRFTISRDNSKNTLYLQMNSLRAEDTAVYYCAKGYSRYYYYGMDVWGQGTTVTVSSGGGGSGGGGSGGGGSGGGGSEIVMTQSPATLSLSPGERAILSCRASQSVYTKYLGWYQQKPGQAPRLLIYDASTRATGIPDRFSGSGSGTDFTLTINRLEPEDFAVYYCQHYGGSPLITFGQGTKVDIK

SEQ ID NO: 468 - protein, 494 aa, Artificial Sequence
  source: /note="Description of Artificial Sequence: Synthetic polypeptide"
MALPVTALLLPLALLLHAARPQVQLVQSGGGVVQPGRSLRLSCAASGFTFSSYGMHWVRQAPGKGLEWVAVISYDGSNKYYADSVKGRFTISRDNSKNTLYLQMNSLRAEDTAVYYCAKGYSRYYYYGMDVWGQGTTVTVSSGGGGSGGGGSGGGGSGGGGSEIVMTQSPATLSLSPGERAILSCRASQSVYTKYLGWYQQKPGQAPRLLIYDASTRATGIPDRFSGSGSGTDFTLTINRLEPEDFAVYYCQHYGGSPLITFGQGTKVDIKTTTPAPRPPTPAPTIASQPLSLRPEACRPAAGGAVHTRGLDFACDIYIWAPLAGTCGVLLLSLVITLYCKRGRKKLLYIFKQPFMRPVQTTQEEDGCSCRFPEEEEGGCELRVKFSRSADAPAYKQGQNQLYNELNLGRREEYDVLDKRRGRDPEMGGKPRRKNPQEGLYNELQKDKMAEAYSEIGMKGERRRGKGHDGLYQGLSTATKDTYDALHMQALPPR

SEQ ID NO: 469 - protein, 249 aa, Artificial Sequence
  source: /note="Description of Artificial Sequence: Synthetic polypeptide"
QVQLVQSGGGLVQPGGSLRLSCAASGFTFSSYAMSWVRQAPGKGLEWVSAISGSGGSTYYADSVKGRFTISRDNSKNTLYLQMNSLRAEDTAVYYCAKREAAAGHDWYFDLWGRGTLVTVSSGGGGSGGGGSGGGGSGGGGSDIRVTQSPSSLSASVGDRVTITCRASQSISSYLNWYQQKPGKAPKLLIYAASSLQSGVPSRFSGSGSGTDFTLTISSLQPEDFATYYCQQSYSIPLTFGQGTKVEIK

SEQ ID NO: 470 - protein, 493 aa, Artificial Sequence
  source: /note="Description of Artificial Sequence: Synthetic polypeptide"
MALPVTALLLPLALLLHAARPQVQLVQSGGGLVQPGGSLRLSCAASGFTFSSYAMSWVRQAPGKGLEWVSAISGSGGSTYYADSVKGRFTISRDNSKNTLYLQMNSLRAEDTAVYYCAKREAAAGHDWYFDLWGRGTLVTVSSGGGGSGGGGSGGGGSGGGGSDIRVTQSPSSLSASVGDRVTITCRASQSISSYLNWYQQKPGKAPKLLIYAASSLQSGVPSRFSGSGSGTDFTLTISSLQPEDFATYYCQQSYSIPLTFGQGTKVEIKTTTPAPRPPTPAPTIASQPLSLRPEACRPAAGGAVHTRGLDFACDIYIWAPLAGTCGVLLLSLVITLYCKRGRKKLLYIFKQPFMRPVQTTQEEDGCSCRFPEEEEGGCELRVKFSRSADAPAYKQGQNQLYNELNLGRREEYDVLDKRRGRDPEMGGKPRRKNPQEGLYNELQKDKMAEAYSEIGMKGERRRGKGHDGLYQGLSTATKDTYDALHMQALPPR

SEQ ID NO: 471 - protein, 239 aa, Artificial Sequence
  source: /note="Description of Artificial Sequence: Synthetic polypeptide"
QVQLQQSGPELEKPGASVKISCKASGYSFTGYTMNWVKQSHGKSLEWIGLITPYNGASSYNQKFRGKATLTVDKSSSTAYMDLLSLTSEDSAVYFCARGGYDGRGFDYWGQGTTVTVSSGGGGSGGGGSGGGGSDIELTQSPAIMSASPGEKVTMTCSASSSVSYMHWYQQKSGTSPKRWIYDTSKLASGVPGRFSGSGSGNSYSLTISSVEAEDDATYYCQQWSGYPLTFGAGTKLEI

SEQ ID NO: 472 - protein, 383 aa, Artificial Sequence
  source: /note="Description of Artificial Sequence: Synthetic polypeptide"
MALPVTALLLPLALLLHAARPQVQLQQSGPELEKPGASVKISCKASGYSFTGYTMNWVKQSHGKSLEWIGLITPYNGASSYNQKFRGKATLTVDKSSSTAYMDLLSLTSEDSAVYFCARGGYDGRGFDYWGQGTTVTVSSGGGGSGGGGSGGGGSDIELTQSPAIMSASPGEKVTMTCSASSSVSYMHWYQQKSGTSPKRWIYDTSKLASGVPGRFSGSGSGNSYSLTISSVEAEDDATYYCQQWSGYPLTFGAGTKLEITTTPAPRPPTPAPTIASQPLSLRPEACRPAAGGAVHTRGLDFACDIYIWAPLAGTCGVLLLSLVITLYCKRGRKKLLYIFKQPFMRPVQTTQEEDGCSCRFPEEEEGGCELRVKFSRSADAPA

SEQ ID NO: 473 - DNA, 732 bp, Artificial Sequence
  source: /note="Description of Artificial Sequence: Synthetic polynucleotide"
caagtccaactgcagcagtcaggagcggaagtgaagaaaccaggagcgtcagtcaaagtgtcgtgcaaggctagcggctacaccttcaccggctactacatgcactgggttcgacaggctccagggcagggtctggagtggatgggccgcatcaacccgaattccggtgggactaactacgcccagaagttccagggaagagtgaccatgactagggacacgtcgatcagcactgcgtacatggaactgagccgcctgcggtccgaggatactgccgtctactactgcgcacgcggaaggtactatggaatggacgtgtggggccaagggactatggtgactgtgagctcgggagggggaggctccggtggcgggggatcaggaggaggaggatcagggggaggaggttccgaaattgtcctcacccagagcccggcaaccctctcactttccccgggagagcgcgcaaccatctcttgccgggctagccaatccgtgtcgtccaatttcgcctggtaccagcaacggccgggacaagcccctagactcctgatctacgacgccagcaacagagcgactggaattcctccacgcttttcgggatcaggctccggtaccgacttcaccctgactatctcgtcgctcgaacccgaggatttcgccgcctactactgtcatcagcggtcgaactggttgtatacgtttggccagggcaccaaggtggatatcaag

SEQ ID NO: 474 - DNA, 1464 bp, Artificial Sequence
  source: /note="Description of Artificial Sequence: Synthetic polynucleotide"
atggccctccctgtcaccgccctgctgcttccgctggctcttctgctccacgccgctcggccccaagtccaactgcagcagtcaggagcggaagtgaagaaaccaggagcgtcagtcaaagtgtcgtgcaaggctagcggctacaccttcaccggctactacatgcactgggttcgacaggctccagggcagggtctggagtggatgggccgcatcaacccgaattccggtgggactaactacgcccagaagttccagggaagagtgaccatgactagggacacgtcgatcagcactgcgtacatggaactgagccgcctgcggtccgaggatactgccgtctactactgcgcacgcggaaggtactatggaatggacgtgtggggccaagggactatggtgactgtgagctcgggagggggaggctccggtggcgggggatcaggaggaggaggatcagggggaggaggttccgaaattgtcctcacccagagcccggcaaccctctcactttccccgggagagcgcgcaaccatctcttgccgggctagccaatccgtgtcgtccaatttcgcctggtaccagcaacggccgggacaagcccctagactcctgatctacgacgccagcaacagagcgactggaattcctccacgcttttcgggatcaggctccggtaccgacttcaccctgactatctcgtcgctcgaacccgaggatttcgccgcctactactgtcatcagcggtcgaactggttgtatacgtttggccagggcaccaaggtggatatcaagaccactaccccagcaccgaggccacccaccccggctcctaccatcgcctcccagcctctgtccctgcgtccggaggcatgtagacccgcagctggtggggccgtgcatacccggggtcttgacttcgcctgcgatatctacatttgggcccctctggctggtacttgcggggtcctgctgctttcactcgtgatcactctttactgtaagcgcggtcggaagaagctgctgtacatctttaagcaacccttcatgaggcctgtgcagactactcaagaggaggacggctgttcatgccggttcccagaggaggaggaaggcggctgcgaactgcgcgtgaaattcagccgcagcgcagatgctccagcctacaagcaggggcagaaccagctctacaacgaactcaatcttggtcggagagaggagtacgacgtgctggacaagcggagaggacgggacccagaaatgggcgggaagccgcgcagaaagaatccccaagagggcctgtacaacgagctccaaaaggataagatggcagaagcctatagcgagattggtatgaaaggggaacgcagaagaggcaaaggccacgacggactgtaccagggactcagcaccgccaccaaggacacctatgacgctcttcacatgcaggccctgccgcctcgg

SEQ ID NO: 475 - DNA, 759 bp, Artificial Sequence
  source: /note="Description of Artificial Sequence: Synthetic polynucleotide"
caagtccaactcgtccagtcaggagcagaagtcaagaaaccaggtgctagcgtgaaagtgtcgtgcaaggcgtcgggatacactttcaccggatactacatgcactgggtccgccaggcccccggacaaggactggaatggatgggctggatcaacccgaatagcgggggaactaattacgcccagaagtttcagggacgagtgaccatgacccgcgatacctctatctcgaccgcctacatggagctctccagactgcgctccgacgatactgcagtgtactactgcgcccgggacctgaggcggactgtggttactcctcgcgcctattatggcatggacgtgtggggccaaggaactactgtgactgtgagctcgggaggcggtgggtcaggcggaggagggtcgggcggtggtggctcgggagggggaggaagcgacattcaacttacgcagagcccgtcaaccctgtcagcgtcagtgggagatcgggtgaccatcacgtgtcaggccagccaggatatctccaactcgctcaactggtaccagcaaaaggcgggtaaagctccgaagctgctgatctacgacgcttccaccctcgagactggagtcccatccagattttccgggtcaggaagcggcaccgatttctccttcaccatttcgtccttgcaaccggaggacatcgcaacctactactgccagcagcatgacaacttgcctctgacgttcgggcagggcaccaaggtggaaatcaag

SEQ ID NO: 476 - DNA, 1491 bp, Artificial Sequence
  source: /note="Description of Artificial Sequence: Synthetic polynucleotide"
atggccctccctgtcaccgccctgctgcttccgctggctcttctgctccacgccgctcggccccaagtccaactcgtccagtcaggagcagaagtcaagaaaccaggtgctagcgtgaaagtgtcgtgcaaggcgtcgggatacactttcaccggatactacatgcactgggtccgccaggcccccggacaaggactggaatggatgggctggatcaacccgaatagcgggggaactaattacgcccagaagtttcagggacgagtgaccatgacccgcgatacctctatctcgaccgcctacatggagctctccagactgcgctccgacgatactgcagtgtactactgcgcccgggacctgaggcggactgtggttactcctcgcgcctattatggcatggacgtgtggggccaaggaactactgtgactgtgagctcgggaggcggtgggtcaggcggaggagggtcgggcggtggtggctcgggagggggaggaagcgacattcaacttacgcagagcccgtcaaccctgtcagcgtcagtgggagatcgggtgaccatcacgtgtcaggccagccaggatatctccaactcgctcaactggtaccagcaaaaggcgggtaaagctccgaagctgctgatctacgacgcttccaccctcgagactggagtcccatccagattttccgggtcaggaagcggcaccgatttctccttcaccatttcgtccttgcaaccggaggacatcgcaacctactactgccagcagcatgacaacttgcctctgacgttcgggcagggcaccaaggtggaaatcaagaccactaccccagcaccgaggccacccaccccggctcctaccatcgcctcccagcctctgtccctgcgtccggaggcatgtagacccgcagctggtggggccgtgcatacccggggtcttgacttcgcctgcgatatctacatttgggcccctctggctggtacttgcggggtcctgctgctttcactcgtgatcactctttactgtaagcgcggtcggaagaagctgctgtacatctttaagcaacccttcatgaggcctgtgcagactactcaagaggaggacggctgttcatgccggttcccagaggaggaggaaggcggctgcgaactgcgcgtgaaattcagccgcagcgcagatgctccagcctacaagcaggggcagaaccagctctacaacgaactcaatcttggtcggagagaggagtacgacgtgctggacaagcggagaggacgggacccagaaatgggcgggaagccgcgcagaaagaatccccaagagggcctgtacaacgagctccaaaaggataagatggcagaagcctatagcgagattggtatgaaaggggaacgcagaagaggcaaaggccacgacggactgtaccagggactcagcaccgccaccaaggacacctatgacgctcttcacatgcaggccctgccgcctcgg

SEQ ID NO: 477 - DNA, 738 bp, Artificial Sequence
  source: /note="Description of Artificial Sequence: Synthetic polynucleotide"
caagtccaactcgtccaatcaggagcggaagtcaaaaagcccggagctccagtgaaagtgtcatgcaaggcctccggctacaccttcaccggttactatatgcactgggtgcggcaggccccgggccaggggttggaatggatgggatggatcaatccaaactcgggtgggactaactacgcccagaagttccaaggacgggtgaccatgactagggacacctcgatctccaccgcatacatggagcttagcagactccgctccgacgataccgcagtctactattgcgcgcggggagagtgggacggatcgtactactacgattactggggccagggaactctggtgactgtttcctcgggtggaggaggttcaggcggaggcggctcgggcgggggaggatctggaggaggagggtccgacattgtgctgacccaaactccttcgtccctgtcggccagcgtgggcgaccgcgtgacgattacgtgcagagctagccaatccatcaatacttacctcaactggtaccagcataagccggggaaagcaccaaagctgctgatctacgccgcctcatccttgcagagcggtgtgccttcacgctttagcggatcgggatcgggaacggatttcaccctgactatcagctccctccagccggaggattttgcgacctactactgtcagcagagcttctcaccgctgactttcggcggcgggaccaagctggaaatcaag

SEQ ID NO: 478 - DNA, 1470 bp, Artificial Sequence
  source: /note="Description of Artificial Sequence: Synthetic polynucleotide"
atggccctccctgtcaccgccctgctgcttccgctggctcttctgctccacgccgctcggccccaagtccaactcgtccaatcaggagcggaagtcaaaaagcccggagctccagtgaaagtgtcatgcaaggcctccggctacaccttcaccggttactatatgcactgggtgcggcaggccccgggccaggggttggaatggatgggatggatcaatccaaactcgggtgggactaactacgcccagaagttccaaggacgggtgaccatgactagggacacctcgatctccaccgcatacatggagcttagcagactccgctccgacgataccgcagtctactattgcgcgcggggagagtgggacggatcgtactactacgattactggggccagggaactctggtgactgtttcctcgggtggaggaggttcaggcggaggcggctcgggcgggggaggatctggaggaggagggtccgacattgtgctgacccaaactccttcgtccctgtcggccagcgtgggcgaccgcgtgacgattacgtgcagagctagccaatccatcaatacttacctcaactggtaccagcataagccggggaaagcaccaaagctgctgatctacgccgcctcatccttgcagagcggtgtgccttcacgctttagcggatcgggatcgggaacggatttcaccctgactatcagctccctccagccggaggattttgcgacctactactgtcagcagagcttctcaccgctgactttcggcggcgggaccaagctggaaatcaagaccactaccccagcaccgaggccacccaccccggctcctaccatcgcctcccagcctctgtccctgcgtccggaggcatgtagacccgcagctggtggggccgtgcatacccggggtcttgacttcgcctgcgatatctacatttgggcccctctggctggtacttgcggggtcctgctgctttcactcgtgatcactctttactgtaagcgcggtcggaagaagctgctgtacatctttaagcaacccttcatgaggcctgtgcagactactcaagaggaggacggctgttcatgccggttcccagaggaggaggaaggcggctgcgaactgcgcgtgaaattcagccgcagcgcagatgctccagcctacaagcaggggcagaaccagctctacaacgaactcaatcttggtcggagagaggagtacgacgtgctggacaagcggagaggacgggacccagaaatgggcgggaagccgcgcagaaagaatccccaagagggcctgtacaacgagctccaaaaggataagatggcagaagcctatagcgagattggtatgaaaggggaacgcagaagaggcaaaggccacgacggactgtaccagggactcagcaccgccaccaaggacacctatgacgctcttcacatgcaggccctgccgcctcgg

SEQ ID NO: 479 - DNA, 726 bp, Artificial Sequence
  source: /note="Description of Artificial Sequence: Synthetic polynucleotide"
caagtgcaactcgttgaatcaggtggaggtttggtgcaacccggaggatctctcagactgtcgtgtgcggcgtccgggttcaccttttcgtcctactggatgcactgggtgcgccaggtgccgggaaaaggactggtgtgggtgtccagaatcaacaccgacgggtcaacgactacctacgcagatagcgtggaaggtcggttcaccatttcgcgggacaacgctaaaaacactctgtaccttcagatgaattcactgcgcgatgacgacaccgcagtctactactgcgtcggtggacactgggcggtctggggacagggaactacggtgactgtgtccagcggcgggggaggaagcggcggaggggggagcggaggcggaggatcaggaggaggcggctccgatatccagatgacccagtcgccatcgaccctctccgctagcgtgggggatagggtcactatcacttgccgagccagccaatccattagcgaccggcttgcctggtaccaacagaaacctggaaaggccccgaagctgctcatctacaaggcctcgtcactggagtcgggagtcccgtcccgcttttccggctcgggctcaggcaccgagttcactctgaccatctcgagcctgcagccggacgatttcgccgtgtattactgccagcaatacggacatctcccaatgtacacgttcggtcagggcaccaaggtcgaaatcaag

SEQ ID NO: 480 - DNA, 1458 bp, Artificial Sequence
  source: /note="Description of Artificial Sequence: Synthetic polynucleotide"
atggccctccctgtcaccgccctgctgcttccgctggctcttctgctccacgccgctcggccccaagtgcaactcgttgaatcaggtggaggtttggtgcaacccggaggatctctcagactgtcgtgtgcggcgtccgggttcaccttttcgtcctactggatgcactgggtgcgccaggtgccgggaaaaggactggtgtgggtgtccagaatcaacaccgacgggtcaacgactacctacgcagatagcgtggaaggtcggttcaccatttcgcgggacaacgctaaaaacactctgtaccttcagatgaattcactgcgcgatgacgacaccgcagtctactactgcgtcggtggacactgggcggtctggggacagggaactacggtgactgtgtccagcggcgggggaggaagcggcggaggggggagcggaggcggaggatcaggaggaggcggctccgatatccagatgacccagtcgccatcgaccctctccgctagcgtgggggatagggtcactatcacttgccgagccagccaatccattagcgaccggcttgcctggtaccaacagaaacctggaaaggccccgaagctgctcatctacaaggcctcgtcactggagtcgggagtcccgtcccgcttttccggctcgggctcaggcaccgagttcactctgaccatctcgagcctgcagccggacgatttcgccgtgtattactgccagcaatacggacatctcccaatgtacacgttcggtcagggcaccaaggtcgaaatcaagaccactaccccagcaccgaggccacccaccccggctcctaccatcgcctcccagcctctgtccctgcgtccggaggcatgtagacccgcagctggtggggccgtgcatacccggggtcttgacttcgcctgcgatatctacatttgggcccctctggctggtacttgcggggtcctgctgctttcactcgtgatcactctttactgtaagcgcggtcggaagaagctgctgtacatctttaagcaacccttcatgaggcctgtgcagactactcaagaggaggacggctgttcatgccggttcccagaggaggaggaaggcggctgcgaactgcgcgtgaaattcagccgcagcgcagatgctccagcctacaagcaggggcagaaccagctctacaacgaactcaatcttggtcggagagaggagtacgacgtgctggacaagcggagaggacgggacccagaaatgggcgggaagccgcgcagaaagaatccccaagagggcctgtacaacgagctccaaaaggataagatggcagaagcctatagcgagattggtatgaaaggggaacgcagaagaggcaaaggccacgacggactgtaccagggactcagcaccgccaccaaggacacctatgacgctcttcacatgcaggccctgccgcctcgg

SEQ ID NO: 481 - DNA, 723 bp, Artificial Sequence
  source: /note="Description of Artificial Sequence: Synthetic polynucleotide"
caagtccaactcgttcaatcaggcgcagaagtcgaaaagcccggagcatcagtcaaagtctcttgcaaggcttccggctacaccttcacggactactacatgcactgggtgcgccaggctccaggccagggactggagtggatgggatggatcaacccgaattccgggggaactaactacgcccagaagtttcagggccgggtgactatgactcgcgatacctcgatctcgactgcgtacatggagctcagccgcctccggtcggacgataccgccgtgtactattgtgcgtcgggatgggacttcgactactgggggcagggcactctggtcactgtgtcaagcggaggaggtggatcaggtggaggtggaagcgggggaggaggttccggcggcggaggatcagatatcgtgatgacgcaatcgccttcctcgttgtccgcatccgtgggagacagggtgaccattacttgcagagcgtcccagtccattcggtactacctgtcgtggtaccagcagaagccggggaaagccccaaaactgcttatctatactgcctcgatcctccaaaacggcgtgccatcaagattcagcggttcgggcagcgggaccgactttaccctgactatcagcagcctgcagccggaagatttcgccacgtactactgcctgcaaacctacaccaccccggacttcggacctggaaccaaggtggagatcaag

SEQ ID NO: 482 - DNA, 1455 bp, Artificial Sequence
  source: /note="Description of Artificial Sequence: Synthetic polynucleotide"
atggccctccctgtcaccgccctgctgcttccgctggctcttctgctccacgccgctcggccccaagtccaactcgttcaatcaggcgcagaagtcgaaaagcccggagcatcagtcaaagtctcttgcaaggcttccggctacaccttcacggactactacatgcactgggtgcgccaggctccaggccagggactggagtggatgggatggatcaacccgaattccgggggaactaactacgcccagaagtttcagggccgggtgactatgactcgcgatacctcgatctcgactgcgtacatggagctcagccgcctccggtcggacgataccgccgtgtactattgtgcgtcgggatgggacttcgactactgggggcagggcactctggtcactgtgtcaagcggaggaggtggatcaggtggaggtggaagcgggggaggaggttccggcggcggaggatcagatatcgtgatgacgcaatcgccttcctcgttgtccgcatccgtgggagacagggtgaccattacttgcagagcgtcccagtccattcggtactacctgtcgtggtaccagcagaagccggggaaagccccaaaactgcttatctatactgcctcgatcctccaaaacggcgtgccatcaagattcagcggttcgggcagcgggaccgactttaccctgactatcagcagcctgcagccggaagatttcgccacgtactactgcctgcaaacctacaccaccccggacttcggacctggaaccaaggtggagatcaagaccactaccccagcaccgaggccacccaccccggctcctaccatcgcctcccagcctctgtccctgcgtccggaggcatgtagacccgcagctggtggggccgtgcatacccggggtcttgacttcgcctgcgatatctacatttgggcccctctggctggtacttgcggggtcctgctgctttcactcgtgatcactctttactgtaagcgcggtcggaagaagctgctgtacatctttaagcaacccttcatgaggcctgtgcagactactcaagaggaggacggctgttcatgccggttcccagaggaggaggaaggcggctgcgaactgcgcgtgaaattcagccgcagcgcagatgctccagcctacaagcaggggcagaaccagctctacaacgaactcaatcttggtcggagagaggagtacgacgtgctggacaagcggagaggacgggacccagaaatgggcgggaagccgcgcagaaagaatccccaagagggcctgtacaacgagctccaaaaggataagatggcagaagcctatagcgagattggtatgaaaggggaacgcagaagaggcaaaggccacgacggactgtaccagggactcagcaccgccaccaaggacacctatgacgctcttcacatgcaggccctgccgcctcgg

SEQ ID NO: 483 - DNA, 759 bp, Artificial Sequence
  source: /note="Description of Artificial Sequence: Synthetic polynucleotide"
caagtgcaactcgtccagtcaggtgcagaagtgaagaaacccggagcgtcagtcaaagtgtcatgcaaggcgtcaggctacaccttcaccagctactacatgcactgggtgcggcaggccccaggccaaggcttggagtggatgggaatcattaacccgtcaggaggctccacctcctacgcccagaagtttcagggaagagtgacgatgactcgggatacgtcgacctcgaccgtgtacatggaactgagctcgctgcgctccgaggacactgctgtgtactactgcgcacggtacagactcattgccgtggcaggagactactactactatggcatggacgtctgggggcagggcactatggtcactgtgtcgtccggcggaggaggctcgggtggaggaggtagcggaggagggggaagcggaggggggggctccgatatccagatgactcagtcgccttcctccgtgtcggcctcggttggagatcgcgtcaccatcacttgtcgagcttcccaaggagtcggtaggtggctggcgtggtaccagcaaaagccgggaactgccccgaagctcctgatctacgcggctagcaccctgcagtcgggagtgccatcccgcttcagcggatctgggtcaggtaccgacttcacccttacgatcaacaatctccagccggaggactttgccacctattactgccaacaggccaacagcttccctctgactttcggagggggcactcgcctggaaatcaag

SEQ ID NO: 484 - DNA, 1491 bp, Artificial Sequence
  source: /note="Description of Artificial Sequence: Synthetic polynucleotide"
atggccctccctgtcaccgccctgctgcttccgctggctcttctgctccacgccgctcggccccaagtgcaactcgtccagtcaggtgcagaagtgaagaaacccggagcgtcagtcaaagtgtcatgcaaggcgtcaggctacaccttcaccagctactacatgcactgggtgcggcaggccccaggccaaggcttggagtggatgggaatcattaacccgtcaggaggctccacctcctacgcccagaagtttcagggaagagtgacgatgactcgggatacgtcgacctcgaccgtgtacatggaactgagctcgctgcgctccgaggacactgctgtgtactactgcgcacggtacagactcattgccgtggcaggagactactactactatggcatggacgtctgggggcagggcactatggtcactgtgtcgtccggcggaggaggctcgggtggaggaggtagcggaggagggggaagcggaggggggggctccgatatccagatgactcagtcgccttcctccgtgtcggcctcggttggagatcgcgtcaccatcacttgtcgagcttcccaaggagtcggtaggtggctggcgtggtaccagcaaaagccgggaactgccccgaagctcctgatctacgcggctagcaccctgcagtcgggagtgccatcccgcttcagcggatctgggtcaggtaccgacttcacccttacgatcaacaatctccagccggaggactttgccacctattactgccaacaggccaacagcttccctctgactttcggagggggcactcgcctggaaatcaagaccactaccccagcaccgaggccacccaccccggctcctaccatcgcctcccagcctctgtccctgcgtccggaggcatgtagacccgcagctggtggggccgtgcatacccggggtcttgacttcgcctgcgatatctacatttgggcccctctggctggtacttgcggggtcctgctgctttcactcgtgatcactctttactgtaagcgcggtcggaagaagctgctgtacatctttaagcaacccttcatgaggcctgtgcagactactcaagaggaggacggctgttcatgccggttcccagaggaggaggaaggcggctgcgaactgcgcgtgaaattcagccgcagcgcagatgctccagcctacaagcaggggcagaaccagctctacaacgaactcaatcttggtcggagagaggagtacgacgtgctggacaagcggagaggacgggacccagaaatgggcgggaagccgcgcagaaagaatccccaagagggcctgtacaacgagctccaaaaggataagatggcagaagcctatagcgagattggtatgaaaggggaacgcagaagaggcaaaggccacgacggactgtaccagggactcagcaccgccaccaaggacacctatgacgctcttcacatgcaggccctgccgcctcgg

SEQ ID NO: 485 - DNA, 750 bp, Artificial Sequence
  source: /note="Description of Artificial Sequence: Synthetic polynucleotide"
caagtgcaattggttcaatcaggaggaggagtggtgcaacctggaagatctctcagactgtcgtgtgcggcatcgggattcactttctcatcatacgcaatgcactgggtccgccaggccccgggcaaaggcttggaatgggtggcggtcatttcatacgacggctcgaacaagtactacgctgacagcgtgaagggacgctttactatttcccgggacaattcgaagaacactctgtacctccagatgaactcccttagggctgaggacaccgccgtctactactgcgcacgctggaaagtgtcgtccagctccccagcttttgactactggggacagggaacccttgtgaccgtgtcgtccggtggagggggaagcggcggagggggatcaggtggcggcggatcgggaggcgggggatcagaaatcgtgctgactcagtccccggccacgctgtctctcagcccgggagagagagcgatcctgtcctgccgcgcctcgcagagcgtgtacactaagtacctggggtggtaccagcagaaaccgggtcaagcgcctcggctgctgatctacgatgcctccacccgggccaccggaatccccgatcggttctccggcagcggctcgggaactgatttcacgctgaccatcaatcgcctggagccggaagatttcgccgtctattactgccagcattacggcgggagcccactcatcaccttcggtcaaggaacccgactcgaaatcaag

SEQ ID NO: 486 - DNA, 1482 bp, Artificial Sequence
  source: /note="Description of Artificial Sequence: Synthetic polynucleotide"
atggccctccctgtcaccgccctgctgcttccgctggctcttctgctccacgccgctcggccccaagtgcaattggttcaatcaggaggaggagtggtgcaacctggaagatctctcagactgtcgtgtgcggcatcgggattcactttctcatcatacgcaatgcactgggtccgccaggccccgggcaaaggcttggaatgggtggcggtcatttcatacgacggctcgaacaagtactacgctgacagcgtgaagggacgctttactatttcccgggacaattcgaagaacactctgtacctccagatgaactcccttagggctgaggacaccgccgtctactactgcgcacgctggaaagtgtcgtccagctccccagcttttgactactggggacagggaacccttgtgaccgtgtcgtccggtggagggggaagcggcggagggggatcaggtggcggcggatcgggaggcgggggatcagaaatcgtgctgactcagtccccggccacgctgtctctcagcccgggagagagagcgatcctgtcctgccgcgcctcgcagagcgtgtacactaagtacctggggtggtaccagcagaaaccgggtcaagcgcctcggctgctgatctacgatgcctccacccgggccaccggaatccccgatcggttctccggcagcggctcgggaactgatttcacgctgaccatcaatcgcctggagccggaagatttcgccgtctattactgccagcattacggcgggagcccactcatcaccttcggtcaaggaacccgactcgaaatcaagaccactaccccagcaccgaggccacccaccccggctcctaccatcgcctcccagcctctgtccctgcgtccggaggcatgtagacccgcagctggtggggccgtgcatacccggggtcttgacttcgcctgcgatatctacatttgggcccctctggctggtacttgcggggtcctgctgctttcactcgtgatcactctttactgtaagcgcggtcggaagaagctgctgtacatctttaagcaacccttcatgaggcctgtgcagactactcaagaggaggacggctgttcatgccggttcccagaggaggaggaaggcggctgcgaactgcgcgtgaaattcagccgcagcgcagatgctccagcctacaagcaggggcagaaccagctctacaacgaactcaatcttggtcggagagaggagtacgacgtgctggacaagcggagaggacgggacccagaaatgggcgggaagccgcgcagaaagaatccccaagagggcctgtacaacgagctccaaaaggataagatggcagaagcctatagcgagattggtatgaaaggggaacgcagaagaggcaaaggccacgacggactgtaccagggactcagcaccgccaccaaggacacctatgacgctcttcacatgcaggccctgccgcctcgg

SEQ ID NO: 487 - DNA, 738 bp, Artificial Sequence
  source: /note="Description of Artificial Sequence: Synthetic polynucleotide"
caagtccaactccagcagtcaggtgcagaagtcaaaaagccaggagcatccgtgaaggtttcgtgcaagacttccggctacccttttaccgggtactccctccattgggtgagacaagcaccgggccagggactggagtggatgggatggatcaacccaaattcgggcggcaccaactatgcgcagaagttccagggacgggtgaccatgactcgcgacacttcgatctccactgcctacatggagctgtcccgcttgagatctgacgacacggccgtctactactgcgcccgggatcactacggaggtaattcgctgttctactgggggcagggaacccttgtgactgtgtcctcgggtggtggagggtcaggaggcggaggctcagggggaggaggtagcggaggaggcggatcagacatccaactgacccagtcaccatcctccatctcggctagcgtcggagacaccgtgtcgattacttgtagggcctcccaagactcagggacgtggctggcgtggtatcagcaaaaaccgggcaaagctccgaacctgttgatgtacgacgccagcaccctcgaagatggagtgcctagccgcttcagcggaagcgcctcgggcactgaattcacgctgactgtgaatcggctccagccggaggattcggcgacctactactgccagcagtacaacagctaccccctgacctttggaggcgggaccaaggtggatatcaag

SEQ ID NO: 488 - DNA, 1470 bp, Artificial Sequence
  source: /note="Description of Artificial Sequence: Synthetic polynucleotide"
atggccctccctgtcaccgccctgctgcttccgctggctcttctgctccacgccgctcggccccaagtccaactccagcagtcaggtgcagaagtcaaaaagccaggagcatccgtgaaggtttcgtgcaagacttccggctacccttttaccgggtactccctccattgggtgagacaagcaccgggccagggactggagtggatgggatggatcaacccaaattcgggcggcaccaactatgcgcagaagttccagggacgggtgaccatgactcgcgacacttcgatctccactgcctacatggagctgtcccgcttgagatctgacgacacggccgtctactactgcgcccgggatcactacggaggtaattcgctgttctactgggggcagggaacccttgtgactgtgtcctcgggtggtggagggtcaggaggcggaggctcagggggaggaggtagcggaggaggcggatcagacatccaactgacccagtcaccatcctccatctcggctagcgtcggagacaccgtgtcgattacttgtagggcctcccaagactcagggacgtggctggcgtggtatcagcaaaaaccgggcaaagctccgaacctgttgatgtacgacgccagcaccctcgaagatggagtgcctagccgcttcagcggaagcgcctcgggcactgaattcacgctgactgtgaatcggctccagccggaggattcggcgacctactactgccagcagtacaacagctaccccctgacctttggaggcgggaccaaggtggatatcaagaccactaccccagcaccgaggccacccaccccggctcctaccatcgcctcccagcctctgtccctgcgtccggaggcatgtagacccgcagctggtggggccgtgcatacccggggtcttgacttcgcctgcgatatctacatttgggcccctctggctggtacttgcggggtcctgctgctttcactcgtgatcactctttactgtaagcgcggtcggaagaagctgctgtacatctttaagcaacccttcatgaggcctgtgcagactactcaagaggaggacggctgttcatgccggttcccagaggaggaggaaggcggctgcgaactgcgcgtgaaattcagccgcagcgcagatgctccagcctacaagcaggggcagaaccagctctacaacgaactcaatcttggtcggagagaggagtacgacgtgctggacaagcggagaggacgggacccagaaatgggcgggaagccgcgcagaaagaatccccaagagggcctgtacaacgagctccaaaaggataagatggcagaagcctatagcgagattggtatgaaaggggaacgcagaagaggcaaaggccacgacggactgtaccagggactcagcaccgccaccaaggacacctatgacgctcttcacatgcaggccctgccgcctcgg

SEQ ID NO: 489 - DNA, 744 bp, Artificial Sequence
  source: /note="Description of Artificial Sequence: Synthetic polynucleotide"
caagtgcaactcgtccagtcaggtgcagaagtgaagaaaccaggagcgtccgtcgaagtgtcgtgtaaggcgtccggctacactttcacctcgtactacatgcactgggtgcggcaggccccgggacaaggcctcgaatggatgggaatcatcaacccgagcggaggctcgactggttacgcccagaagttccagggaagggtgacgatgacccgcgatacctcgacttcgaccgttcatatggagctctcgtccctgcggagcgaggacactgctgtctactattgcgcgcggggaggatactctagctcctccgatgcatttgacatttggggccagggaactatggtgaccgtgtcatcaggcggaggtggatcaggaggaggagggtcgggagggggaggcagcggcgggggtgggtcggacattcagatgacgcagtcccctcctagcctgagcgcctcggtgggtgacagagtgaccatcacttgcagagcctcgcaagacatctcctccgcattggcttggtaccagcaaaagccgggcactccgccgaaactgctcatctacgatgcctcctcactggagtcaggagtcccatctcgcttctcggggtcaggaagcggcaccgattttacccttaccatctccagcctgcagcccgaggacttcgccacgtactactgccaacagttcagctcctacccactgaccttcgggggcggaactcgcctggaaatcaag

SEQ ID NO: 490 - DNA, 1476 bp, Artificial Sequence
  source: /note="Description of Artificial Sequence: Synthetic polynucleotide"
atggccctccctgtcaccgccctgctgcttccgctggctcttctgctccacgccgctcggccccaagtgcaactcgtccagtcaggtgcagaagtgaagaaaccaggagcgtccgtcgaagtgtcgtgtaaggcgtccggctacactttcacctcgtactacatgcactgggtgcggcaggccccgggacaaggcctcgaatggatgggaatcatcaacccgagcggaggctcgactggttacgcccagaagttccagggaagggtgacgatgacccgcgatacctcgacttcgaccgttcatatggagctctcgtccctgcggagcgaggacactgctgtctactattgcgcgcggggaggatactctagctcctccgatgcatttgacatttggggccagggaactatggtgaccgtgtcatcaggcggaggtggatcaggaggaggagggtcgggagggggaggcagcggcgggggtgggtcggacattcagatgacgcagtcccctcctagcctgagcgcctcggtgggtgacagagtgaccatcacttgcagagcctcgcaagacatctcctccgcattggcttggtaccagcaaaagccgggcactccgccgaaactgctcatctacgatgcctcctcactggagtcaggagtcccatctcgcttctcggggtcaggaagcggcaccgattttacccttaccatctccagcctgcagcccgaggacttcgccacgtactactgccaacagttcagctcctacccactgaccttcgggggcggaactcgcctggaaatcaagaccactaccccagcaccgaggccacccaccccggctcctaccatcgcctcccagcctctgtccctgcgtccggaggcatgtagacccgcagctggtggggccgtgcatacccggggtcttgacttcgcctgcgatatctacatttgggcccctctggctggtacttgcggggtcctgctgctttcactcgtgatcactctttactgtaagcgcggtcggaagaagctgctgtacatctttaagcaacccttcatgaggcctgtgcagactactcaagaggaggacggctgttcatgccggttcccagaggaggaggaaggcggctgcgaactgcgcgtgaaattcagccgcagcgcagatgctccagcctacaagcaggggcagaaccagctctacaacgaactcaatcttggtcggagagaggagtacgacgtgctggacaagcggagaggacgggacccagaaatgggcgggaagccgcgcagaaagaatccccaagagggcctgtacaacgagctccaaaaggataagatggcagaagcctatagcgagattggtatgaaaggggaacgcagaagaggcaaaggccacgacggactgtaccagggactcagcaccgccaccaaggacacctatgacgctcttcacatgcaggccctgccgcctcgg

SEQ ID NO: 491 - DNA, 765 bp, Artificial Sequence
  source: /note="Description of Artificial Sequence: Synthetic polynucleotide"
caagtgcaactcgtccagagcggagcagaagtcaagaagccaggagcgtcagtgaaagtgtcatgcaaggccagcggctatacctttacttcgtatgggatctcctgggtgcggcaggcaccgggccaaggactggagtggatgggatggatctcagcctacaacggtaacaccaactacgcccagaagctgcaaggacgcgtgaccatgactactgatacgagcacctccactgcctacatggaattgcggtcccttcggtcggacgatactgctgtgtactactgcgcaagagtcgccggagggatctactactactacggcatggacgtctggggacagggaaccaccattacggtgtcgagcggagggggaggctcggggggaggaggaagcggaggtggcggctccgggggcggcggatcggacattgtgatgacccagactcctgactccctggctgtttcgttgggagagcgcgcgactatctcgtgtaagtccagccactcagtcctgtacaatcgcaataacaagaactacctcgcgtggtaccagcaaaaaccgggtcagccgcctaaactcctgttctactgggcctccaccagaaagagcggggtgccagatcgattctctggatcaggatcaggtaccgactttacgctgaccatctcgtccctgcagccggaggatttcgcgacttacttctgccagcagactcagactttccccctcaccttcggtcaaggcaccaggctggaaatcaat

SEQ ID NO: 492 - DNA, 1497 bp, Artificial Sequence
  source: /note="Description of Artificial Sequence: Synthetic polynucleotide"
atggccctccctgtcaccgccctgctgcttccgctggctcttctgctccacgccgctcggccccaagtgcaactcgtccagagcggagcagaagtcaagaagccaggagcgtcagtgaaagtgtcatgcaaggccagcggctatacctttacttcgtatgggatctcctgggtgcggcaggcaccgggccaaggactggagtggatgggatggatctcagcctacaacggtaacaccaactacgcccagaagctgcaaggacgcgtgaccatgactactgatacgagcacctccactgcctacatggaattgcggtcccttcggtcggacgatactgctgtgtactactgcgcaagagtcgccggagggatctactactactacggcatggacgtctggggacagggaaccaccattacggtgtcgagcggagggggaggctcggggggaggaggaagcggaggtggcggctccgggggcggcggatcggacattgtgatgacccagactcctgactccctggctgtttcgttgggagagcgcgcgactatctcgtgtaagtccagccactcagtcctgtacaatcgcaataacaagaactacctcgcgtggtaccagcaaaaaccgggtcagccgcctaaactcctgttctactgggcctccaccagaaagagcggggtgccagatcgattctctggatcaggatcaggtaccgactttacgctgaccatctcgtccctgcagccggaggatttcgcgacttacttctgccagcagactcagactttccccctcaccttcggtcaaggcaccaggctggaaatcaataccactaccccagcaccgaggccacccaccccggctcctaccatcgcctcccagcctctgtccctgcgtccggaggcatgtagacccgcagctggtggggccgtgcatacccggggtcttgacttcgcctgcgatatctacatttgggcccctctggctggtacttgcggggtcctgctgctttcactcgtgatcactctttactgtaagcgcggtcggaagaagctgctgtacatctttaagcaacccttcatgaggcctgtgcagactactcaagaggaggacggctgttcatgccggttcccagaggaggaggaaggcggctgcgaactgcgcgtgaaattcagccgcagcgcagatgctccagcctacaagcaggggcagaaccagctctacaacgaactcaatcttggtcggagagaggagtacgacgtgctggacaagcggagaggacgggacccagaaatgggcgggaagccgcgcagaaagaatccccaagagggcctgtacaacgagctccaaaaggataagatggcagaagcctatagcgagattggtatgaaaggggaacgcagaagaggcaaaggccacgacggactgtaccagggactcagcaccgccaccaaggacacctatgacgctcttcacatgcaggccctgccgcctcgg

SEQ ID NO: 493 - DNA, 723 bp, Artificial Sequence
  source: /note="Description of Artificial Sequence: Synthetic polynucleotide"
caagtccaattgcagcagagcggagcagaagtgaagaagccaggagcgtcagtcaaagtgtcgtgtaaggcgtcaggatacaccttcacgggatactacatgcactgggtgcgccaggccccgggccaaggactcgagtggatgggctggatcaaccctaactctggaggcaccaactacgcccagaatttccaaggcagagtgaccatgacccgggacacctccatctcgactgcctatatggaactgcggcggctgcgctcggacgatactgctgtgtattactgcgccagcggctgggactttgactactggggacagggtactctggtgactgtttcctcgggaggaggcggatcgggtggaggaggtagcgggggaggggggtcgggaggcggaggcagcgatattcgcatgactcaatcgccgtcctccctgagcgctagcgtgggagatcgagtcaccatcacttgcagagcgtcacagtcgattcgctactacctgtcctggtaccagcagaaaccgggaaaggcaccaaagcttctgatctacacggcctccatcctgcaaaatggtgtcccatcaaggttctccgggtcagggagcggcactgacttcactctcaccatctcctcactccagcccgaggactttgcaacctactactgcctccagacgtacaccaccccggatttcggtcctggaaccaaggtggaaatcaaa

SEQ ID NO: 494 - DNA, 1455 bp, Artificial Sequence
  source: /note="Description of Artificial Sequence: Synthetic polynucleotide"
atggccctccctgtcaccgccctgctgcttccgctggctcttctgctccacgccgctcggccccaagtccaattgcagcagagcggagcagaagtgaagaagccaggagcgtcagtcaaagtgtcgtgtaaggcgtcaggatacaccttcacgggatactacatgcactgggtgcgccaggccccgggccaaggactcgagtggatgggctggatcaaccctaactctggaggcaccaactacgcccagaatttccaaggcagagtgaccatgacccgggacacctccatctcgactgcctatatggaactgcggcggctgcgctcggacgatactgctgtgtattactgcgccagcggctgggactttgactactggggacagggtactctggtgactgtttcctcgggaggaggcggatcgggtggaggaggtagcgggggaggggggtcgggaggcggaggcagcgatattcgcatgactcaatcgccgtcctccctgagcgctagcgtgggagatcgagtcaccatcacttgcagagcgtcacagtcgattcgctactacctgtcctggtaccagcagaaaccgggaaaggcaccaaagcttctgatctacacggcctccatcctgcaaaatggtgtcccatcaaggttctccgggtcagggagcggcactgacttcactctcaccatctcctcactccagcccgaggactttgcaacctactactgcctccagacgtacaccaccccggatttcggtcctggaaccaaggtggaaatcaaaaccactaccccagcaccgaggccacccaccccggctcctaccatcgcctcccagcctctgtccctgcgtccggaggcatgtagacccgcagctggtggggccgtgcatacccggggtcttgacttcgcctgcgatatctacatttgggcccctctggctggtacttgcggggtcctgctgctttcactcgtgatcactctttactgtaagcgcggtcggaagaagctgctgtacatctttaagcaacccttcatgaggcctgtgcagactactcaagaggaggacggctgttcatgccggttcccagaggaggaggaaggcggctgcgaactgcgcgtgaaattcagccgcagcgcagatgctccagcctacaagcaggggcagaaccagctctacaacgaactcaatcttggtcggagagaggagtacgacgtgctggacaagcggagaggacgggacccagaaatgggcgggaagccgcgcagaaagaatccccaagagggcctgtacaacgagctccaaaaggataagatggcagaagcctatagcgagattggtatgaaaggggaacgcagaagaggcaaaggccacgacggactgtaccagggactcagcaccgccaccaaggacacctatgacgctcttcacatgcaggccctgccgcctcgg

SEQ ID NO: 495 - DNA, 738 bp, Artificial Sequence
  source: /note="Description of Artificial Sequence: Synthetic polynucleotide"
caagtccaactcgtccaaagcggagcagaagtcaaaaagccaggagcgtcggtgaaagtgtcttgcaaagccagcggctacaccttcacgggttactacatgcactgggtgcgccaggcgccgggccaggggctggagtggatgggccggattaaccctaacagcgggggaactaattacgctcagaagttccagggtagagtcaccatgactacggacacttccacttccaccgcctatatggaactgcgctccctccgctcagatgatactgccgtgtattactgcgcgcggactaccacgtcatacgcatttgacatctggggccagggaactatggtgaccgtgagctcgggcggaggcggttcagggggaggaggaagcggaggaggaggatcgggaggaggtggctccgatatccagctgactcagtccccgagcaccctgtcggcgtcggtgggggacagggttaccatcacctgtagagcttcccaatccatttcgacttggctggcctggtaccagcaaaagccgggaaaggcccctaatttgcttatctacaaggcatcgaccctcgaaagcggtgtgccctcccggttttcgggatcaggatcagggaccgagttcaccctgaccatctcatccctccagccggacgacttcgccacttactactgccagcagtacaacacctactcgccatacactttcggccaaggcaccaagctggagatcaag

SEQ ID NO: 496 - DNA, 1470 bp, Artificial Sequence
  source: /note="Description of Artificial Sequence: Synthetic polynucleotide"
atggccctccctgtcaccgccctgctgcttccgctggctcttctgctccacgccgctcggccccaagtccaactcgtccaaagcggagcagaagtcaaaaagccaggagcgtcggtgaaagtgtcttgcaaagccagcggctacaccttcacgggttactacatgcactgggtgcgccaggcgccgggccaggggctggagtggatgggccggattaaccctaacagcgggggaactaattacgctcagaagttccagggtagagtcaccatgactacggacacttccacttccaccgcctatatggaactgcgctccctccgctcagatgatactgccgtgtattactgcgcgcggactaccacgtcatacgcatttgacatctggggccagggaactatggtgaccgtgagctcgggcggaggcggttcagggggaggaggaagcggaggaggaggatcgggaggaggtggctccgatatccagctgactcagtccccgagcaccctgtcggcgtcggtgggggacagggttaccatcacctgtagagcttcccaatccatttcgacttggctggcctggtaccagcaaaagccgggaaaggcccctaatttgcttatctacaaggcatcgaccctcgaaagcggtgtgccctcccggttttcgggatcaggatcagggaccgagttcaccctgaccatctcatccctccagccggacgacttcgccacttactactgccagcagtacaacacctactcgccatacactttcggccaaggcaccaagctggagatcaagaccactaccccagcaccgaggccacccaccccggctcctaccatcgcctcccagcctctgtccctgcgtccggaggcatgtagacccgcagctggtggggccgtgcatacccggggtcttgacttcgcctgcgatatctacatttgggcccctctggctggtacttgcggggtcctgctgctttcactcgtgatcactctttactgtaagcgcggtcggaagaagctgctgtacatctttaagcaacccttcatgaggcctgtgcagactactcaagaggaggacggctgttcatgccggttcccagaggaggaggaaggcggctgcgaactgcgcgtgaaattcagccgcagcgcagatgctccagcctacaagcaggggcagaaccagctctacaacgaactcaatcttggtcggagagaggagtacgacgtgctggacaagcggagaggacgggacccagaaatgggcgggaagccgcgcagaaagaatccccaagagggcctgtacaacgagctccaaaaggataagatggcagaagcctatagcgagattggtatgaaaggggaacgcagaagaggcaaaggccacgacggactgtaccagggactcagcaccgccaccaaggacacctatgacgctcttcacatgcaggccctgccgcctcgg

SEQ ID NO: 497 - DNA, 747 bp, Artificial Sequence
  source: /note="Description of Artificial Sequence: Synthetic polynucleotide"
caagttcaactcgtgcaatcaggtggaggactcgtcaaacccggaggatcattgagactgtcatgcgaagcgagcggttttatcttctccgattactatatgggatggattcggcaggccccgggaaagggactcgaatgggtgtcatacatcggaaggtcaggctcgtccatgtactacgcagactcggtgaaaggcagattcacctttagccgggacaacgccaagaattccctctacttgcagatgaacagcctgcgagccgaggatactgctgtctactactgtgccgcgtcgccggtggtggcagctactgaagatttccagcactggggacagggaactctggtcacggtgtcgagcggtgggggcggaagcggaggcggaggatcgggcggcggaggttcgggggggggagggtctgacatcgtgatgacccaaaccccagccaccctgagcctctcccctggagagcgcgcgactctttcgtgccgcgcttcccagtcagtgaccagcaattacttggcttggtaccaacagaagccgggacaggcgccacggctgctgctttttggtgccagcactcgcgccaccggaatcccggatcgcttctcgggctcagggtccgggacggacttcaccctgactatcaaccggctggaacctgaggacttcgcgatgtactactgccagcagtacggctccgcaccagtcactttcggacaaggcaccaagctggagatcaag

SEQ ID NO: 498 - DNA, 1479 bp, Artificial Sequence
  source: /note="Description of Artificial Sequence: Synthetic polynucleotide"
atggccctccctgtcaccgccctgctgcttccgctggctcttctgctccacgccgctcggccccaagttcaactcgtgcaatcaggtggaggactcgtcaaacccggaggatcattgagactgtcatgcgaagcgagcggttttatcttctccgattactatatgggatggattcggcaggccccgggaaagggactcgaatgggtgtcatacatcggaaggtcaggctcgtccatgtactacgcagactcggtgaaaggcagattcacctttagccgggacaacgccaagaattccctctacttgcagatgaacagcctgcgagccgaggatactgctgtctactactgtgccgcgtcgccggtggtggcagctactgaagatttccagcactggggacagggaactctggtcacggtgtcgagcggtgggggcggaagcggaggcggaggatcgggcggcggaggttcgggggggggagggtctgacatcgtgatgacccaaaccccagccaccctgagcctctcccctggagagcgcgcgactctttcgtgccgcgcttcccagtcagtgaccagcaattacttggcttggtaccaacagaagccgggacaggcgccacggctgctgctttttggtgccagcactcgcgccaccggaatcccggatcgcttctcgggctcagggtccgggacggacttcaccctgactatcaaccggctggaacctgaggacttcgcgatgtactactgccagcagtacggctccgcaccagtcactttcggacaaggcaccaagctggagatcaagaccactaccccagcaccgaggccacccaccccggctcctaccatcgcctcccagcctctgtccctgcgtccggaggcatgtagacccgcagctggtggggccgtgcatacccggggtcttgacttcgcctgcgatatctacatttgggcccctctggctggtacttgcggggtcctgctgctttcactcgtgatcactctttactgtaagcgcggtcggaagaagctgctgtacatctttaagcaacccttcatgaggcctgtgcagactactcaagaggaggacggctgttcatgccggttcccagaggaggaggaaggcggctgcgaactgcgcgtgaaattcagccgcagcgcagatgctccagcctacaagcaggggcagaaccagctctacaacgaactcaatcttggtcggagagaggagtacgacgtgctggacaagcggagaggacgggacccagaaatgggcgggaagccgcgcagaaagaatccccaagagggcctgtacaacgagctccaaaaggataagatggcagaagcctatagcgagattggtatgaaaggggaacgcagaagaggcaaaggccacgacggactgtaccagggactcagcaccgccaccaaggacacctatgacgctcttcacatgcaggccctgccgcctcgg

SEQ ID NO: 499 - DNA, 747 bp, Artificial Sequence
  source: /note="Description of Artificial Sequence: Synthetic polynucleotide"
caagtccaactcgtccagtcgggagcagaagttagagcaccaggagcgtcagtgaaaatctcatgcaaggcctcgggcttcacgttccgcggatactacatccactgggtgcgccaagccccgggtcagggattggagtggatgggaatcattaacccatcaggagggagccgggcttacgcgcagaagttccagggacgcgtcactatgacccgagatacttccacctcgactgtgtacatggaactctcgtccctgaggtccgacgacactgcgatgtattactgtgctcggactgccagctgcggtggggactgttactacctcgattactggggccagggaactctggtgaccgtgtccagcggaggtggcgggtcagggggtggcggaagcggaggcggcggttcaggcggaggaggctcggacatccaaatgacgcaatcgccgcctaccctgagcgcttccgtgggagatcgggtgaccattacttgcagagcatccgagaacgtcaatatctggctggcctggtaccaacagaagccggggaaggcccctaaactgctgatctacaagtcgagcagccttgcctctggagtgccctcccgcttctcgggctcgggatcaggagcggaattcaccctcaccatctcctccctgcagccagatgactttgccacctactactgccagcagtaccagagctatccgttgacctttgggggaggcactaaagtggacatcaag

SEQ ID NO: 500 - DNA, 1479 bp, Artificial Sequence
  source: /note="Description of Artificial Sequence: Synthetic polynucleotide"
atggccctccctgtcaccgccctgctgcttccgctggctcttctgctccacgccgctcggccccaagtccaactcgtccagtcgggagcagaagttagagcaccaggagcgtcagtgaaaatctcatgcaaggcctcgggcttcacgttccgcggatactacatccactgggtgcgccaagccccgggtcagggattggagtggatgggaatcattaacccatcaggagggagccgggcttacgcgcagaagttccagggacgcgtcactatgacccgagatacttccacctcgactgtgtacatggaactctcgtccctgaggtccgacgacactgcgatgtattactgtgctcggactgccagctgcggtggggactgttactacctcgattactggggccagggaactctggtgaccgtgtccagcggaggtggcgggtcagggggtggcggaagcggaggcggcggttcaggcggaggaggctcggacatccaaatgacgcaatcgccgcctaccctgagcgcttccgtgggagatcgggtgaccattacttgcagagcatccgagaacgtcaatatctggctggcctggtaccaacagaagccggggaaggcccctaaactgctgatctacaagtcgagcagccttgcctctggagtgccctcccgcttctcgggctcgggatcaggagcggaattcaccctcaccatctcctccctgcagccagatgactttgccacctactactgccagcagtaccagagctatccgttgacctttgggggaggcactaaagtggacatcaagaccactaccccagcaccgaggccacccaccccggctcctaccatcgcctcccagcctctgtccctgcgtccggaggcatgtagacccgcagctggtggggccgtgcatacccggggtcttgacttcgcctgcgatatctacatttgggcccctctggctggtacttgcggggtcctgctgctttcactcgtgatcactctttactgtaagcgcggtcggaagaagctgctgtacatctttaagcaacccttcatgaggcctgtgcagactactcaagaggaggacggctgttcatgccggttcccagaggaggaggaaggcggctgcgaactgcgcgtgaaattcagccgcagcgcagatgctccagcctacaagcaggggcagaaccagctctacaacgaactcaatcttggtcggagagaggagtacgacgtgctggacaagcggagaggacgggacccagaaatgggcgggaagccgcgcagaaagaatccccaagagggcctgtacaacgagctccaaaaggataagatggcagaagcctatagcgagattggtatgaaaggggaacgcagaagaggcaaaggccacgacggactgtaccagggactcagcaccgccaccaaggacacctatgacgctcttcacatgcaggccctgccgcctcgg

SEQ ID NO: 501 - DNA, 732 bp, Artificial Sequence
  source: /note="Description of Artificial Sequence: Synthetic polynucleotide"
caagttcaactcgttcaatcaggtggaggactcgtgcaaccaggaagatcactcagactcagctgcgccgcgtcgggattcactttcgatgactacgcaatgcactgggtgcggcaggccccgggcaaaggactggaatgggtgagcggaattagctggaactcggggtccatcgggtacgccgactcggtgaagggacgctttacgatctcccgggacaatgccaagaactccctgtatttgcagatgaactccttgagggctgaggacaccgccgtgtactactgcgctaaagatggatcatcgtcctggtcctggggatacttcgattactggggccagggcactctggtgaccgtgtcgtcaggcggtggagggtcgggcggaggaggtagcggaggcggagggagcagctctgaactgacccaagacccggcggtgtcggtcgcccttggtcagactgtgcggactacctgtcagggggacgcgctgcgctcgtactacgcttcatggtaccagcagaagcccggacaggcacctatgctggtcatctacggaaagaataaccgcccatccggcatcccggatcgcttctcgggttcggacagcggcgacaccgcatccctgacgatcactggagcgcaggccgaggatgaagccgactactactgcaattcccgagattcaagcggctaccctgtgtttgggaccggaactaaggtcaccgtcctg

SEQ ID NO: 502 - DNA, 1464 bp, Artificial Sequence
  source: /note="Description of Artificial Sequence: Synthetic polynucleotide"
atggccctccctgtcaccgccctgctgcttccgctggctcttctgctccacgccgctcggccccaagttcaactcgttcaatcaggtggaggactcgtgcaaccaggaagatcactcagactcagctgcgccgcgtcgggattcactttcgatgactacgcaatgcactgggtgcggcaggccccgggcaaaggactggaatgggtgagcggaattagctggaactcggggtccatcgggtacgccgactcggtgaagggacgctttacgatctcccgggacaatgccaagaactccctgtatttgcagatgaactccttgagggctgaggacaccgccgtgtactactgcgctaaagatggatcatcgtcctggtcctggggatacttcgattactggggccagggcactctggtgaccgtgtcgtcaggcggtggagggtcgggcggaggaggtagcggaggcggagggagcagctctgaactgacccaagacccggcggtgtcggtcgcccttggtcagactgtgcggactacctgtcagggggacgcgctgcgctcgtactacgcttcatggtaccagcagaagcccggacaggcacctatgctggtcatctacggaaagaataaccgcccatccggcatcccggatcgcttctcgggttcggacagcggcgacaccgcatccctgacgatcactggagcgcaggccgaggatgaagccgactactactgcaattcccgagattcaagcggctaccctgtgtttgggaccggaactaaggtcaccgtcctgaccactaccccagcaccgaggccacccaccccggctcctaccatcgcctcccagcctctgtccctgcgtccggaggcatgtagacccgcagctggtggggccgtgcatacccggggtcttgacttcgcctgcgatatctacatttgggcccctctggctggtacttgcggggtcctgctgctttcactcgtgatcactctttactgtaagcgcggtcggaagaagctgctgtacatctttaagcaacccttcatgaggcctgtgcagactactcaagaggaggacggctgttcatgccggttcccagaggaggaggaaggcggctgcgaactgcgcgtgaaattcagccgcagcgcagatgctccagcctacaagcaggggcagaaccagctctacaacgaactcaatcttggtcggagagaggagtacgacgtgctggacaagcggagaggacgggacccagaaatgggcgggaagccgcgcagaaagaatccccaagagggcctgtacaacgagctccaaaaggataagatggcagaagcctatagcgagattggtatgaaaggggaacgcagaagaggcaaaggccacgacggactgtaccagggactcagcaccgccaccaaggacacctatgacgctcttcacatgcaggccctgccgcctcgg

SEQ ID NO: 503 - DNA, 738 bp, Artificial Sequence
  source: /note="Description of Artificial Sequence: Synthetic polynucleotide"
gaagtgcaactcgtggaatctggtggaggacttgtgcaacctggaagatcgttgagactctcatgtgctgcctccgggttcacctttgacgactacgccatgcactgggtgcgccaggcaccaggaaagggtctggagtgggtttcgggtatctcgtggaactccgggagcactggctacgctgattcggtgaaaggccggtttaccatctcccgagacaatgcgaagaattccctctatctgcagatgaacagcctccgggccgaggatactgccctgtactactgcgccaaggatagctcatcatggtacggaggtggatcggctttcgatatctggggccagggcacgatggtcaccgtgtcctcggggggcggaggctccgggggaggaggtagcggaggaggaggatcgagctcagagttgactcaagaacccgcagtgtccgtggcactgggccaaaccgtcaggatcacttgccagggagacagcctgaggtcgtactacgcgtcctggtaccagcagaagccgggacaggccccggtcctggtcattttcggacgctcaagacgcccatcgggcatcccggaccggttcagcggaagctcctcgggaaacaccgcgtcacttatcattaccggcgcacaggctgaggacgaagcggattactactgcaactcccgcgacaatactgccaaccattacgtgttcgggaccggaacgaaactgactgtcctg

SEQ ID NO: 504 - DNA, 1470 bp, Artificial Sequence
  source: /note="Description of Artificial Sequence: Synthetic polynucleotide"
atggccctccctgtcaccgccctgctgcttccgctggctcttctgctccacgccgctcggcccgaagtgcaactcgtggaatctggtggaggacttgtgcaacctggaagatcgttgagactctcatgtgctgcctccgggttcacctttgacgactacgccatgcactgggtgcgccaggcaccaggaaagggtctggagtgggtttcgggtatctcgtggaactccgggagcactggctacgctgattcggtgaaaggccggtttaccatctcccgagacaatgcgaagaattccctctatctgcagatgaacagcctccgggccgaggatactgccctgtactactgcgccaaggatagctcatcatggtacggaggtggatcggctttcgatatctggggccagggcacgatggtcaccgtgtcctcggggggcggaggctccgggggaggaggtagcggaggaggaggatcgagctcagagttgactcaagaacccgcagtgtccgtggcactgggccaaaccgtcaggatcacttgccagggagacagcctgaggtcgtactacgcgtcctggtaccagcagaagccgggacaggccccggtcctggtcattttcggacgctcaagacgcccatcgggcatcccggaccggttcagcggaagctcctcgggaaacaccgcgtcacttatcattaccggcgcacaggctgaggacgaagcggattactactgcaactcccgcgacaatactgccaaccattacgtgttcgggaccggaacgaaactgactgtcctgaccactaccccagcaccgaggccacccaccccggctcctaccatcgcctcccagcctctgtccctgcgtccggaggcatgtagacccgcagctggtggggccgtgcatacccggggtcttgacttcgcctgcgatatctacatttgggcccctctggctggtacttgcggggtcctgctgctttcactcgtgatcactctttactgtaagcgcggtcggaagaagctgctgtacatctttaagcaacccttcatgaggcctgtgcagactactcaagaggaggacggctgttcatgccggttcccagaggaggaggaaggcggctgcgaactgcgcgtgaaattcagccgcagcgcagatgctccagcctacaagcaggggcagaaccagctctacaacgaactcaatcttggtcggagagaggagtacgacgtgctggacaagcggagaggacgggacccagaaatgggcgggaagccgcgcagaaagaatccccaagagggcctgtacaacgagctccaaaaggataagatggcagaagcctatagcgagattggtatgaaaggggaacgcagaagaggcaaaggccacgacggactgtaccagggactcagcaccgccaccaaggacacctatgacgctcttcacatgcaggccctgccgcctcgg

SEQ ID NO: 505 - DNA, 738 bp, Artificial Sequence
  source: /note="Description of Artificial Sequence: Synthetic polynucleotide"
gaagttcaattggtggaatctggaggaggacttgtgcaacccggtagatctctgagactgtcctgtgcggcatcgggattcaccttcgacgactacgctatgcactgggtgagacaagcccctggaaaaggactggagtgggtgtcaggcatctcctggaatagcgggtccactggatacgccgattcggtcaagggtcgcttcaccatttcccgggacaatgccaagaactccctgtaccttcaaatgaactccctccgggccgaggataccgccctctactactgcgccaaagacagctcgtcatggtatggcggagggtcggcatttgacatctggggacagggaactatggtgactgtgtcatcaggaggcggcggaagcggcggcggcgggtccggcggaggagggtcgtccagcgaactcacccaagatccagcagtgagcgtcgcgctgggccagaccgtcaggatcacgtgccagggagattcactgcgctcatactacgcgtcctggtaccagcagaagccggggcaggccccggtcctcgtgatctacggaaagaacaaccgcccgtcgggtatcccagaccgcttttcgggtagctccagcggaaatacggctagcctgaccatcactggagcacaggctgaggatgaagcggactactactgcaattcgcggggctcatcggggaaccattacgtgttcggaactggtaccaaggtgactgtcctg

SEQ ID NO: 506 - DNA, 1470 bp, Artificial Sequence
  source: /note="Description of Artificial Sequence: Synthetic polynucleotide"
atggccctccctgtcaccgccctgctgcttccgctggctcttctgctccacgccgctcggcccgaagttcaattggtggaatctggaggaggacttgtgcaacccggtagatctctgagactgtcctgtgcggcatcgggattcaccttcgacgactacgctatgcactgggtgagacaagcccctggaaaaggactggagtgggtgtcaggcatctcctggaatagcgggtccactggatacgccgattcggtcaagggtcgcttcaccatttcccgggacaatgccaagaactccctgtaccttcaaatgaactccctccgggccgaggataccgccctctactactgcgccaaagacagctcgtcatggtatggcggagggtcggcatttgacatctggggacagggaactatggtgactgtgtcatcaggaggcggcggaagcggcggcggcgggtccggcggaggagggtcgtccagcgaactcacccaagatccagcagtgagcgtcgcgctgggccagaccgtcaggatcacgtgccagggagattcactgcgctcatactacgcgtcctggtaccagcagaagccggggcaggccccggtcctcgtgatctacggaaagaacaaccgcccgtcgggtatcccagaccgcttttcgggtagctccagcggaaatacggctagcctgaccatcactggagcacaggctgaggatgaagcggactactactgcaattcgcggggctcatcggggaaccattacgtgttcggaactggtaccaaggtgactgtcctgaccactaccccagcaccgaggccacccaccccggctcctaccatcgcctcccagcctctgtccctgcgtccggaggcatgtagacccgcagctggtggggccgtgcatacccggggtcttgacttcgcctgcgatatctacatttgggcccctctggctggtacttgcggggtcctgctgctttcactcgtgatcactctttactgtaagcgcggtcggaagaagctgctgtacatctttaagcaacccttcatgaggcctgtgcagactactcaagaggaggacggctgttcatgccggttcccagaggaggaggaaggcggctgcgaactgcgcgtgaaattcagccgcagcgcagatgctccagcctacaagcaggggcagaaccagctctacaacgaactcaatcttggtcggagagaggagtacgacgtgctggacaagcggagaggacgggacccagaaatgggcgggaagccgcgcagaaagaatccccaagagggcctgtacaacgagctccaaaaggataagatggcagaagcctatagcgagattggtatgaaaggggaacgcagaagaggcaaaggccacgacggactgtaccagggactcagcaccgccaccaaggacacctatgacgctcttcacatgcaggccctgccgcctcgg

SEQ ID NO: 507 - DNA, 753 bp, Artificial Sequence
  source: /note="Description of Artificial Sequence: Synthetic polynucleotide"
caagtgcagctcgttcaatcaggcggaggactcgttcaaccaggaggatcattgcgactctcatgtgcggcctctggattcacgtttagctcatattggatgcactgggtgcggcaggcgccggggaaaggtctggtgtgggtcagccgcatcaactcagacggctcctcgacttcgtacgccgactccgtgaagggacgctttaccatttcccgcgacaacgccaagaataccctttaccttcagatgaactccctccgcgctgaggataccgccgtgtactactgcgtgaggactggctgggtcggcagctactactactacatggacgtgtggggcaaaggaactactgtcaccgtgtcaagcggcggtggaggttccggcgggggaggatcgggggggggcggatcgggtggcggaggatcggagatcgtgttgacccagtcgccgggaaccctgtcgctgtcgcctggggagagagcaactctgtcctgccgggcttcccagtcggtgtcgagcaattacctggcatggtaccaacagaagccgggacagccgccacgcctgctgatctatgacgtgtcaactcgggcaactggaatccctgcgcggttcagcggcggagggagcggtaccgatttcaccctgactatttcctccctcgaaccagaagatttcgccgtctactactgccagcagagaagcaactggccgccctggacgttcggacaaggaaccaaggtcgaaatcaag

SEQ ID NO: 508 - DNA, 1485 bp, Artificial Sequence
  source: /note="Description of Artificial Sequence: Synthetic polynucleotide"
atggccctccctgtcaccgccctgctgcttccgctggctcttctgctccacgccgctcggccccaagtgcagctcgttcaatcaggcggaggactcgttcaaccaggaggatcattgcgactctcatgtgcggcctctggattcacgtttagctcatattggatgcactgggtgcggcaggcgccggggaaaggtctggtgtgggtcagccgcatcaactcagacggctcctcgacttcgtacgccgactccgtgaagggacgctttaccatttcccgcgacaacgccaagaataccctttaccttcagatgaactccctccgcgctgaggataccgccgtgtactactgcgtgaggactggctgggtcggcagctactactactacatggacgtgtggggcaaaggaactactgtcaccgtgtcaagcggcggtggaggttccggcgggggaggatcgggggggggcggatcgggtggcggaggatcggagatcgtgttgacccagtcgccgggaaccctgtcgctgtcgcctggggagagagcaactctgtcctgccgggcttcccagtcggtgtcgagcaattacctggcatggtaccaacagaagccgggacagccgccacgcctgctgatctatgacgtgtcaactcgggcaactggaatccctgcgcggttcagcggcggagggagcggtaccgatttcaccctgactatttcctccctcgaaccagaagatttcgccgtctactactgccagcagagaagcaactggccgccctggacgttcggacaaggaaccaaggtcgaaatcaagaccactaccccagcaccgaggccacccaccccggctcctaccatcgcctcccagcctctgtccctgcgtccggaggcatgtagacccgcagctggtggggccgtgcatacccggggtcttgacttcgcctgcgatatctacatttgggcccctctggctggtacttgcggggtcctgctgctttcactcgtgatcactctttactgtaagcgcggtcggaagaagctgctgtacatctttaagcaacccttcatgaggcctgtgcagactactcaagaggaggacggctgttcatgccggttcccagaggaggaggaaggcggctgcgaactgcgcgtgaaattcagccgcagcgcagatgctccagcctacaagcaggggcagaaccagctctacaacgaactcaatcttggtcggagagaggagtacgacgtgctggacaagcggagaggacgggacccagaaatgggcgggaagccgcgcagaaagaatccccaagagggcctgtacaacgagctccaaaaggataagatggcagaagcctatagcgagattggtatgaaaggggaacgcagaagaggcaaaggccacgacggactgtaccagggactcagcaccgccaccaaggacacctatgacgctcttcacatgcaggccctgccgcctcgg

SEQ ID NO: 509 - DNA, 750 bp, Artificial Sequence
  source: /note="Description of Artificial Sequence: Synthetic polynucleotide"
caagtgcaattggttcaatcaggaggaggagtcgtgcagcccggaagatcgttgagactgtcatgtgccgcgagcggctttactttctcaagctacggaatgcattgggtgcgacaggctccgggaaaaggactggaatgggtcgcagtgatctcatacgacggctcgaacaagtactacgccgactccgtcaagggtcggttcacgatttcgcgcgataattccaagaacactctgtacctccaaatgaacagcctccgggcagaggacaccgccgtctactactgcgctaagggatactcgcgctactactactatggaatggatgtgtggggccagggaactaccgtgacggtgtcgtccggcggcggtgggtcgggcggaggcggatcaggtggaggtggaagcggaggaggagggagcgaaatcgtcatgactcagtcccctgctaccctttctctgtcgccgggagaaagagccatcctgagctgccgggcctcccagagcgtgtacaccaaatacctgggatggtaccagcagaagccggggcaggcaccaaggctcctgatctacgatgcgtccacccgcgcgactggtatcccagaccgcttttccggctcggggtcagggactgacttcacccttactatcaatcggctcgagcctgaggatttcgccgtgtattactgccagcactacggagggtccccgctgattaccttcggccaaggcaccaaagtggacatcaag

SEQ ID NO: 510 - DNA, 1482 bp, Artificial Sequence
  source: /note="Description of Artificial Sequence: Synthetic polynucleotide"
atggccctccctgtcaccgccctgctgcttccgctggctcttctgctccacgccgctcggccccaagtgcaattggttcaatcaggaggaggagtcgtgcagcccggaagatcgttgagactgtcatgtgccgcgagcggctttactttctcaagctacggaatgcattgggtgcgacaggctccgggaaaaggactggaatgggtcgcagtgatctcatacgacggctcgaacaagtactacgccgactccgtcaagggtcggttcacgatttcgcgcgataattccaagaacactctgtacctccaaatgaacagcctccgggcagaggacaccgccgtctactactgcgctaagggatactcgcgctactactactatggaatggatgtgtggggccagggaactaccgtgacggtgtcgtccggcggcggtgggtcgggcggaggcggatcaggtggaggtggaagcggaggaggagggagcgaaatcgtcatgactcagtcccctgctaccctttctctgtcgccgggagaaagagccatcctgagctgccgggcctcccagagcgtgtacaccaaatacctgggatggtaccagcagaagccggggcaggcaccaaggctcctgatctacgatgcgtccacccgcgcgactggtatcccagaccgcttttccggctcggggtcagggactgacttcacccttactatcaatcggctcgagcctgaggatttcgccgtgtattactgccagcactacggagggtccccgctgattaccttcggccaaggcaccaaagtggacatcaagaccactaccccagcaccgaggccacccaccccggctcctaccatcgcctcccagcctctgtccctgcgtccggaggcatgtagacccgcagctggtggggccgtgcatacccggggtcttgacttcgcctgcgatatctacatttgggcccctctggctggtacttgcggggtcctgctgctttcactcgtgatcactctttactgtaagcgcggtcggaagaagctgctgtacatctttaagcaacccttcatgaggcctgtgcagactactcaagaggaggacggctgttcatgccggttcccagaggaggaggaaggcggctgcgaactgcgcgtgaaattcagccgcagcgcagatgctccagcctacaagcaggggcagaaccagctctacaacgaactcaatcttggtcggagagaggagtacgacgtgctggacaagcggagaggacgggacccagaaatgggcgggaagccgcgcagaaagaatccccaagagggcctgtacaacgagctccaaaaggataagatggcagaagcctatagcgagattggtatgaaaggggaacgcagaagaggcaaaggccacgacggactgtaccagggactcagcaccgccaccaaggacacctatgacgctcttcacatgcaggccctgccgcctcgg

SEQ ID NO: 511 - DNA, 747 bp, Artificial Sequence
  source: /note="Description of Artificial Sequence: Synthetic polynucleotide"
caagtgcaacttgttcaatcaggaggaggactcgttcaacccggaggatcactgcgactctcatgtgcagcgtcggggttcaccttctccagctacgcaatgtcctgggtgcgccaagcccctggaaaaggcctggagtgggtgtcggccatctctgggagcgggggatcaacttactacgctgactccgtcaagggccgctttaccatctcccgggacaacagcaagaacactctctatctccagatgaactcgctgagagccgaagataccgctgtctactactgcgcgaagagagaagctgccgcagggcacgattggtacttcgacttgtggggcaggggcacccttgtgaccgtgtcctccggtggaggcggatcaggaggtgggggatcgggtggaggaggaagcggaggcggcggttcggacattcgcgtcacccagtcaccgagctccctcagcgcatcggtgggcgaccgggtcactatcacttgccgggcgtcccagtcgatctcatcgtatctgaattggtaccagcagaaaccgggaaaggcgccgaagctgttgatctacgctgccagctccctgcagtcgggtgtgccatcacgcttttccggctcgggatcgggaaccgatttcactctgacgatctctagcctgcagccagaagatttcgccacttactactgccagcagtcctacagcatccctctgactttcggacaagggacgaaagtggagattaag

SEQ ID NO: 512 - DNA, 1479 bp, Artificial Sequence
  source: /note="Description of Artificial Sequence: Synthetic polynucleotide"
atggccctccctgtcaccgccctgctgcttccgctggctcttctgctccacgccgctcggccccaagtgcaacttgttcaatcaggaggaggactcgttcaacccggaggatcactgcgactctcatgtgcagcgtcggggttcaccttctccagctacgcaatgtcctgggtgcgccaagcccctggaaaaggcctggagtgggtgtcggccatctctgggagcgggggatcaacttactacgctgactccgtcaagggccgctttaccatctcccgggacaacagcaagaacactctctatctccagatgaactcgctgagagccgaagataccgctgtctactactgcgcgaagagagaagctgccgcagggcacgattggtacttcgacttgtggggcaggggcacccttgtgaccgtgtcctccggtggaggcggatcaggaggtgggggatcgggtggaggaggaagcggaggcggcggttcggacattcgcgtcacccagtcaccgagctccctcagcgcatcggtgggcgaccgggtcactatcacttgccgggcgtcccagtcgatctcatcgtatctgaattggtaccagcagaaaccgggaaaggcgccgaagctgttgatctacgctgccagctccctgcagtcgggtgtgccatcacgcttttccggctcgggatcgggaaccgatttcactctgacgatctctagcctgcagccagaagatttcgccacttactactgccagcagtcctacagcatccctctgactttcggacaagggacgaaagtggagattaagaccactaccccagcaccgaggccacccaccccggctcctaccatcgcctcccagcctctgtccctgcgtccggaggcatgtagacccgcagctggtggggccgtgcatacccggggtcttgacttcgcctgcgatatctacatttgggcccctctggctggtacttgcggggtcctgctgctttcactcgtgatcactctttactgtaagcgcggtcggaagaagctgctgtacatctttaagcaacccttcatgaggcctgtgcagactactcaagaggaggacggctgttcatgccggttcccagaggaggaggaaggcggctgcgaactgcgcgtgaaattcagccgcagcgcagatgctccagcctacaagcaggggcagaaccagctctacaacgaactcaatcttggtcggagagaggagtacgacgtgctggacaagcggagaggacgggacccagaaatgggcgggaagccgcgcagaaagaatccccaagagggcctgtacaacgagctccaaaaggataagatggcagaagcctatagcgagattggtatgaaaggggaacgcagaagaggcaaaggccacgacggactgtaccagggactcagcaccgccaccaaggacacctatgacgctcttcacatgcaggccctgccgcctcgg

SEQ ID NO: 513 - DNA, 741 bp, Artificial Sequence
  source: /note="Description of Artificial Sequence: Synthetic polynucleotide"
caagtccaactcgttcagtcatgggcagaagtcaagaaacccggtgcaagcgtcaaagtgtcgtgtaaggcctccggctacactttcacttcctactacatgcactgggtgcgccaagccccgggacagggccttgaatggatgggcatcatcaacccatcaggaggttccacgagctacgcgcagaagttccaggggagagtgacgatgactagagatacctccacgagcaccgtctacatggagctgtcgaatctgcggtcagaggacactgctgtgtattactgcgcgcgctccccgcgggtgaccactggctactttgactactggggacaagggaccctggtgaccgtcagctcgggaggcggaggatcgggaggtggagggtccggtggaggcggctctggaggaggcgggtcggacattcaattgacccagagcccatccaccctctcagcctcggtgggggatagggtgactatcacttgccgggcctcccagtcaatttccagctggctggcttggtaccagcaaaagcctggaaaggcaccgaagctcctgatctacaaggcctcatctctggaatcaggagtgccttcgcgcttcagcggaagcggctcgggaactgagtttaccctgaccatctcgagcctgcagccagatgacttcgcgacctattactgccagcagtactcgtcctacccgttgactttcggaggaggtacccgcctcgaaatcaaa

SEQ ID NO: 514 - DNA, 1473 bp, Artificial Sequence
  source: /note="Description of Artificial Sequence: Synthetic polynucleotide"
atggccctccctgtcaccgccctgctgcttccgctggctcttctgctccacgccgctcggccccaagtccaactcgttcagtcatgggcagaagtcaagaaacccggtgcaagcgtcaaagtgtcgtgtaaggcctccggctacactttcacttcctactacatgcactgggtgcgccaagccccgggacagggccttgaatggatgggcatcatcaacccatcaggaggttccacgagctacgcgcagaagttccaggggagagtgacgatgactagagatacctccacgagcaccgtctacatggagctgtcgaatctgcggtcagaggacactgctgtgtattactgcgcgcgctccccgcgggtgaccactggctactttgactactggggacaagggaccctggtgaccgtcagctcgggaggcggaggatcgggaggtggagggtccggtggaggcggctctggaggaggcgggtcggacattcaattgacccagagcccatccaccctctcagcctcggtgggggatagggtgactatcacttgccgggcctcccagtcaatttccagctggctggcttggtaccagcaaaagcctggaaaggcaccgaagctcctgatctacaaggcctcatctctggaatcaggagtgccttcgcgcttcagcggaagcggctcgggaactgagtttaccctgaccatctcgagcctgcagccagatgacttcgcgacctattactgccagcagtactcgtcctacccgttgactttcggaggaggtacccgcctcgaaatcaaaaccactaccccagcaccgaggccacccaccccggctcctaccatcgcctcccagcctctgtccctgcgtccggaggcatgtagacccgcagctggtggggccgtgcatacccggggtcttgacttcgcctgcgatatctacatttgggcccctctggctggtacttgcggggtcctgctgctttcactcgtgatcactctttactgtaagcgcggtcggaagaagctgctgtacatctttaagcaacccttcatgaggcctgtgcagactactcaagaggaggacggctgttcatgccggttcccagaggaggaggaaggcggctgcgaactgcgcgtgaaattcagccgcagcgcagatgctccagcctacaagcaggggcagaaccagctctacaacgaactcaatcttggtcggagagaggagtacgacgtgctggacaagcggagaggacgggacccagaaatgggcgggaagccgcgcagaaagaatccccaagagggcctgtacaacgagctccaaaaggataagatggcagaagcctatagcgagattggtatgaaaggggaacgcagaagaggcaaaggccacgacggactgtaccagggactcagcaccgccaccaaggacacctatgacgctcttcacatgcaggccctgccgcctcgg

SEQ ID NO: 515 - DNA, 759 bp, Artificial Sequence
  source: /note="Description of Artificial Sequence: Synthetic polynucleotide"
caagtccaactcgtccagtccggtgcagaagtcagaaggccaggagcaagcgtgaagatctcgtgtagagcgtcaggagacaccagcactcgccattacatccactggctgcgccaggctccgggccaagggccggagtggatgggtgtgatcaacccgactacgggaccggctaccggaagccctgcgtacgcacagatgctgcagggacgggtgactatgacccgcgatactagcactaggaccgtgtacatggaactccgctcgttgcggttcgaagataccgccgtctactactgcgcccggtccgtggtgggccgaagcgccccttactacttcgattactggggacagggcactctggtgaccgttagctccggtgggggaggctcgggtggaggcggatcgggaggaggaggcagcggtggagggggatcggacattcagatgacccagtcaccctcctccctctcagcctcggtcggggaccgggtgaccattacgtgcagagcctcacaagggatctcggactactccgcctggtaccagcagaaaccgggaaaagcgccaaagctcctgatctacgccgcgagcaccctgcaatcaggagtgccatcgcgcttttctggatcgggctcagggactgacttcacgctgactatctcctaccttcagtccgaggatttcgctacctactactgccaacagtattactcctatcccctgacctttggcggaggcactaaggtggacatcaag

SEQ ID NO: 516 - DNA, 1491 bp, Artificial Sequence
  source: /note="Description of Artificial Sequence: Synthetic polynucleotide"
atggccctccctgtcaccgccctgctgcttccgctggctcttctgctccacgccgctcggccccaagtccaactcgtccagtccggtgcagaagtcagaaggccaggagcaagcgtgaagatctcgtgtagagcgtcaggagacaccagcactcgccattacatccactggctgcgccaggctccgggccaagggccggagtggatgggtgtgatcaacccgactacgggaccggctaccggaagccctgcgtacgcacagatgctgcagggacgggtgactatgacccgcgatactagcactaggaccgtgtacatggaactccgctcgttgcggttcgaagataccgccgtctactactgcgcccggtccgtggtgggccgaagcgccccttactacttcgattactggggacagggcactctggtgaccgttagctccggtgggggaggctcgggtggaggcggatcgggaggaggaggcagcggtggagggggatcggacattcagatgacccagtcaccctcctccctctcagcctcggtcggggaccgggtgaccattacgtgcagagcctcacaagggatctcggactactccgcctggtaccagcagaaaccgggaaaagcgccaaagctcctgatctacgccgcgagcaccctgcaatcaggagtgccatcgcgcttttctggatcgggctcagggactgacttcacgctgactatctcctaccttcagtccgaggatttcgctacctactactgccaacagtattactcctatcccctgacctttggcggaggcactaaggtggacatcaagaccactaccccagcaccgaggccacccaccccggctcctaccatcgcctcccagcctctgtccctgcgtccggaggcatgtagacccgcagctggtggggccgtgcatacccggggtcttgacttcgcctgcgatatctacatttgggcccctctggctggtacttgcggggtcctgctgctttcactcgtgatcactctttactgtaagcgcggtcggaagaagctgctgtacatctttaagcaacccttcatgaggcctgtgcagactactcaagaggaggacggctgttcatgccggttcccagaggaggaggaaggcggctgcgaactgcgcgtgaaattcagccgcagcgcagatgctccagcctacaagcaggggcagaaccagctctacaacgaactcaatcttggtcggagagaggagtacgacgtgctggacaagcggagaggacgggacccagaaatgggcgggaagccgcgcagaaagaatccccaagagggcctgtacaacgagctccaaaaggataagatggcagaagcctatagcgagattggtatgaaaggggaacgcagaagaggcaaaggccacgacggactgtaccagggactcagcaccgccaccaaggacacctatgacgctcttcacatgcaggccctgccgcctcgg

SEQ ID NO: 517 - DNA, 747 bp, Artificial Sequence
  source: /note="Description of Artificial Sequence: Synthetic polynucleotide"
caagtccaactccagcaatcgggagcagaagtcaagaaaccaggcgcatcggtgaaagtgtcgtgtaaggcgtcagggtacaccttcaccaactactatatgcactgggtgcgccaggctccaggccaggggttggagtggatggggatcatcaatccgtcaggtggctacaccacttacgctcagaagttccagggacgcctcactatgactcgcgatactagcacctccacggtgtacatggaactgtcatcgctgaggtccgaagataccgccgtctactactgcgcacggatcagatcctgcggaggagattgttactactttgacaactggggacagggcacccttgttactgtgtcatcgggaggagggggaagcggaggaggtggatcaggcggcggtggcagcgggggcggaggatcggacattcagctgactcagtccccctccactttgtcggccagcgtgggagacagagtgaccatcacttgccgggcgtccgagaacgtcaatatctggctggcctggtaccagcaaaagcctggaaaagccccgaagctgctcatctataagtcatccagcctggcgtctggtgtgccgtcgcggttctccggcagcgggagcggagccgagttcactctcaccatttcgagccttcaaccggacgatttcgccacctactactgccagcagtaccaatcctaccctctgacgtttggaggtggaaccaaggtggacatcaag

SEQ ID NO: 518 - DNA, 1479 bp, Artificial Sequence
  source: /note="Description of Artificial Sequence: Synthetic polynucleotide"
atggccctccctgtcaccgccctgctgcttccgctggctcttctgctccacgccgctcggccccaagtccaactccagcaatcgggagcagaagtcaagaaaccaggcgcatcggtgaaagtgtcgtgtaaggcgtcagggtacaccttcaccaactactatatgcactgggtgcgccaggctccaggccaggggttggagtggatggggatcatcaatccgtcaggtggctacaccacttacgctcagaagttccagggacgcctcactatgactcgcgatactagcacctccacggtgtacatggaactgtcatcgctgaggtccgaagataccgccgtctactactgcgcacggatcagatcctgcggaggagattgttactactttgacaactggggacagggcacccttgttactgtgtcatcgggaggagggggaagcggaggaggtggatcaggcggcggtggcagcgggggcggaggatcggacattcagctgactcagtccccctccactttgtcggccagcgtgggagacagagtgaccatcacttgccgggcgtccgagaacgtcaatatctggctggcctggtaccagcaaaagcctggaaaagccccgaagctgctcatctataagtcatccagcctggcgtctggtgtgccgtcgcggttctccggcagcgggagcggagccgagttcactctcaccatttcgagccttcaaccggacgatttcgccacctactactgccagcagtaccaatcctaccctctgacgtttggaggtggaaccaaggtggacatcaagaccactaccccagcaccgaggccacccaccccggctcctaccatcgcctcccagcctctgtccctgcgtccggaggcatgtagacccgcagctggtggggccgtgcatacccggggtcttgacttcgcctgcgatatctacatttgggcccctctggctggtacttgcggggtcctgctgctttcactcgtgatcactctttactgtaagcgcggtcggaagaagctgctgtacatctttaagcaacccttcatgaggcctgtgcagactactcaagaggaggacggctgttcatgccggttcccagaggaggaggaaggcggctgcgaactgcgcgtgaaattcagccgcagcgcagatgctccagcctacaagcaggggcagaaccagctctacaacgaactcaatcttggtcggagagaggagtacgacgtgctggacaagcggagaggacgggacccagaaatgggcgggaagccgcgcagaaagaatccccaagagggcctgtacaacgagctccaaaaggataagatggcagaagcctatagcgagattggtatgaaaggggaacgcagaagaggcaaaggccacgacggactgtaccagggactcagcaccgccaccaaggacacctatgacgctcttcacatgcaggccctgccgcctcgg

SEQ ID NO: 519 - DNA, 738 bp, Artificial Sequence
  source: /note="Description of Artificial Sequence: Synthetic polynucleotide"
caaatcactctgaaagaatctggaccggccctggttaagccgactcaaacgctcacccttacttgcaccttcagcggattctcactcagcactgctggtgtgcacgtcggatggattagacagccgcctggaaaggccctggaatggctcgccctcatctcctgggccgatgacaagagatacaggccctcgcttcgatcccggttggacattacccgggtgacctcgaaagatcaggtggtgctctcaatgaccaatatgcagccggaggacaccgctacgtactactgcgcactgcaaggatttgacggctacgaggctaactggggaccaggtactctggtcaccgtgagctccggcgggggaggatcaggcgggggggggtcaggaggcggaggctccggtggaggaggatcggatatcgtcatgacccagtccccaagctcgctgagcgcgtcagcgggcgaccgcgtgactatcacttgccgggccagccgcggcatctcctccgcactggcgtggtaccagcagaagcctggaaaaccgccaaagctcctgatctatgatgcctccagcctggagtcaggtgtccccagccgcttctcgggttcgggctcgggaaccgacttcactttgaccatcgactcgctggaaccggaagatttcgcaacctactactgtcagcagtcctactcgaccccttggacttttggacaagggacgaaggtggacatcaag

SEQ ID NO: 520 - DNA, 1470 bp, Artificial Sequence
  source: /note="Description of Artificial Sequence: Synthetic polynucleotide"
atggccctccctgtcaccgccctgctgcttccgctggctcttctgctccacgccgctcggccccaaatcactctgaaagaatctggaccggccctggttaagccgactcaaacgctcacccttacttgcaccttcagcggattctcactcagcactgctggtgtgcacgtcggatggattagacagccgcctggaaaggccctggaatggctcgccctcatctcctgggccgatgacaagagatacaggccctcgcttcgatcccggttggacattacccgggtgacctcgaaagatcaggtggtgctctcaatgaccaatatgcagccggaggacaccgctacgtactactgcgcactgcaaggatttgacggctacgaggctaactggggaccaggtactctggtcaccgtgagctccggcgggggaggatcaggcgggggggggtcaggaggcggaggctccggtggaggaggatcggatatcgtcatgacccagtccccaagctcgctgagcgcgtcagcgggcgaccgcgtgactatcacttgccgggccagccgcggcatctcctccgcactggcgtggtaccagcagaagcctggaaaaccgccaaagctcctgatctatgatgcctccagcctggagtcaggtgtccccagccgcttctcgggttcgggctcgggaaccgacttcactttgaccatcgactcgctggaaccggaagatttcgcaacctactactgtcagcagtcctactcgaccccttggacttttggacaagggacgaaggtggacatcaagaccactaccccagcaccgaggccacccaccccggctcctaccatcgcctcccagcctctgtccctgcgtccggaggcatgtagacccgcagctggtggggccgtgcatacccggggtcttgacttcgcctgcgatatctacatttgggcccctctggctggtacttgcggggtcctgctgctttcactcgtgatcactctttactgtaagcgcggtcggaagaagctgctgtacatctttaagcaacccttcatgaggcctgtgcagactactcaagaggaggacggctgttcatgccggttcccagaggaggaggaaggcggctgcgaactgcgcgtgaaattcagccgcagcgcagatgctccagcctacaagcaggggcagaaccagctctacaacgaactcaatcttggtcggagagaggagtacgacgtgctggacaagcggagaggacgggacccagaaatgggcgggaagccgcgcagaaagaatccccaagagggcctgtacaacgagctccaaaaggataagatggcagaagcctatagcgagattggtatgaaaggggaacgcagaagaggcaaaggccacgacggactgtaccagggactcagcaccgccaccaaggacacctatgacgctcttcacatgcaggccctgccgcctcgg

SEQ ID NO: 521 - DNA, 717 bp, Artificial Sequence
  source: /note="Description of Artificial Sequence: Synthetic polynucleotide"
caagtccagctccagcagtcgggcccagagttggagaagcctggggcgagcgtgaagatctcatgcaaagcctcaggctactcctttactggatacacgatgaattgggtgaaacagtcgcatggaaagtcactggaatggatcggtctgattacgccctacaacggcgcctccagctacaaccagaagttcaggggaaaggcgacccttactgtcgacaagtcgtcaagcaccgcctacatggacctcctgtccctgacctccgaagatagcgcggtctacttttgtgcacgcggaggttacgatggacggggattcgactactggggccagggaaccactgtcaccgtgtcgagcggaggcggagggagcggaggaggaggcagcggaggtggagggtcggatatcgaactcactcagtccccagcaatcatgtccgcttcaccgggagaaaaggtgaccatgacttgctcggcctcctcgtccgtgtcatacatgcactggtaccaacaaaaatcggggacctcccctaagagatggatctacgataccagcaaactggcttcaggcgtgccgggacgcttctcgggttcggggagcggaaattcgtattcgttgaccatttcgtccgtggaagccgaggacgacgcaacttattactgccaacagtggtcaggctacccgctcactttcggagccggcactaagctggagatc

SEQ ID NO: 522 - DNA, 1149 bp, Artificial Sequence
  source: /note="Description of Artificial Sequence: Synthetic polynucleotide"
atggccctccctgtcaccgccctgctgcttccgctggctcttctgctccacgccgctcggccccaagtccagctccagcagtcgggcccagagttggagaagcctggggcgagcgtgaagatctcatgcaaagcctcaggctactcctttactggatacacgatgaattgggtgaaacagtcgcatggaaagtcactggaatggatcggtctgattacgccctacaacggcgcctccagctacaaccagaagttcaggggaaaggcgacccttactgtcgacaagtcgtcaagcaccgcctacatggacctcctgtccctgacctccgaagatagcgcggtctacttttgtgcacgcggaggttacgatggacggggattcgactactggggccagggaaccactgtcaccgtgtcgagcggaggcggagggagcggaggaggaggcagcggaggtggagggtcggatatcgaactcactcagtccccagcaatcatgtccgcttcaccgggagaaaaggtgaccatgacttgctcggcctcctcgtccgtgtcatacatgcactggtaccaacaaaaatcggggacctcccctaagagatggatctacgataccagcaaactggcttcaggcgtgccgggacgcttctcgggttcggggagcggaaattcgtattcgttgaccatttcgtccgtggaagccgaggacgacgcaacttattactgccaacagtggtcaggctacccgctcactttcggagccggcactaagctggagatcaccactaccccagcaccgaggccacccaccccggctcctaccatcgcctcccagcctctgtccctgcgtccggaggcatgtagacccgcagctggtggggccgtgcatacccggggtcttgacttcgcctgcgatatctacatttgggcccctctggctggtacttgcggggtcctgctgctttcactcgtgatcactctttactgtaagcgcggtcggaagaagctgctgtacatctttaagcaacccttcatgaggcctgtgcagactactcaagaggaggacggctgttcatgccggttcccagaggaggaggaaggcggctgcgaactgcgcgtgaaattcagccgcagcgcagatgctccagcc

SEQ ID NO: 523-890 - skipped (368 entries)

SEQ ID NO: 891 - protein, 486 aa, Artificial Sequence
  source: /note="Description of Artificial Sequence: Synthetic polypeptide"
MALPVTALLLPLALLLHAARPDIQMTQTTSSLSASLGDRVTISCRASQDISKYLNWYQQKPDGTVKLLIYHTSRLHSGVPSRFSGSGSGTDYSLTISNLEQEDIATYFCQQGNTLPYTFGGGTKLEITGGGGSGGGGSGGGGSEVKLQESGPGLVAPSQSLSVTCTVSGVSLPDYGVSWIRQPPRKGLEWLGVIWGSETTYYNSALKSRLTIIKDNSKSQVFLKMNSLQTDDTAIYYCAKHYYYGGSYAMDYWGQGTSVTVSSTTTPAPRPPTPAPTIASQPLSLRPEACRPAAGGAVHTRGLDFACDIYIWAPLAGTCGVLLLSLVITLYCKRGRKKLLYIFKQPFMRPVQTTQEEDGCSCRFPEEEEGGCELRVKFSRSADAPAYKQGQNQLYNELNLGRREEYDVLDKRRGRDPEMGGKPRRKNPQEGLYNELQKDKMAEAYSEIGMKGERRRGKGHDGLYQGLSTATKDTYDALHMQALPPR

SEQ ID NO: 892 - protein, 465 aa, Artificial Sequence
  source: /note="Description of Artificial Sequence: Synthetic polypeptide"
DIQMTQTTSSLSASLGDRVTISCRASQDISKYLNWYQQKPDGTVKLLIYHTSRLHSGVPSRFSGSGSGTDYSLTISNLEQEDIATYFCQQGNTLPYTFGGGTKLEITGGGGSGGGGSGGGGSEVKLQESGPGLVAPSQSLSVTCTVSGVSLPDYGVSWIRQPPRKGLEWLGVIWGSETTYYNSALKSRLTIIKDNSKSQVFLKMNSLQTDDTAIYYCAKHYYYGGSYAMDYWGQGTSVTVSSTTTPAPRPPTPAPTIASQPLSLRPEACRPAAGGAVHTRGLDFACDIYIWAPLAGTCGVLLLSLVITLYCKRGRKKLLYIFKQPFMRPVQTTQEEDGCSCRFPEEEEGGCELRVKFSRSADAPAYKQGQNQLYNELNLGRREEYDVLDKRRGRDPEMGGKPRRKNPQEGLYNELQKDKMAEAYSEIGMKGERRRGKGHDGLYQGLSTATKDTYDALHMQALPPR

SEQ ID NO: 893 - protein, 242 aa, Artificial Sequence
  source: /note="Description of Artificial Sequence: Synthetic polypeptide"
EIVMTQSPATLSLSPGERATLSCRASQDISKYLNWYQQKPGQAPRLLIYHTSRLHSGIPARFSGSGSGTDYTLTISSLQPEDFAVYFCQQGNTLPYTFGQGTKLEIKGGGGSGGGGSGGGGSQVQLQESGPGLVKPSETLSLTCTVSGVSLPDYGVSWIRQPPGKGLEWIGVIWGSETTYYSSSLKSRVTISKDNSKNQVSLKLSSVTAADTAVYYCAKHYYYGGSYAMDYWGQGTLVTVSS

SEQ ID NO: 894 - DNA, 813 bp, Artificial Sequence
  source: /note="Description of Artificial Sequence: Synthetic polynucleotide"
atggccctccctgtcaccgccctgctgcttccgctggctcttctgctccacgccgctcggcccgaaattgtgatgacccagtcacccgccactcttagcctttcacccggtgagcgcgcaaccctgtcttgcagagcctcccaagacatctcaaaataccttaattggtatcaacagaagcccggacaggctcctcgccttctgatctaccacaccagccggctccattctggaatccctgccaggttcagcggtagcggatctgggaccgactacaccctcactatcagctcactgcagccagaggacttcgctgtctatttctgtcagcaagggaacaccctgccctacacctttggacagggcaccaagctcgagattaaaggtggaggtggcagcggaggaggtgggtccggcggtggaggaagccaggtccaactccaagaaagcggaccgggtcttgtgaagccatcagaaactctttcactgacttgtactgtgagcggagtgtctctccccgattacggggtgtcttggatcagacagccaccggggaagggtctggaatggattggagtgatttggggctctgagactacttactactcttcatccctcaagtcacgcgtcaccatctcaaaggacaactctaagaatcaggtgtcactgaaactgtcatctgtgaccgcagccgacaccgccgtgtactattgcgctaagcattactattatggcgggagctacgcaatggattactggggacagggtactctggtcaccgtgtccagccaccaccatcatcaccatcaccat

SEQ ID NO: 895 - protein, 271 aa, Artificial Sequence
  source: /note="Description of Artificial Sequence: Synthetic polypeptide"
MALPVTALLLPLALLLHAARPEIVMTQSPATLSLSPGERATLSCRASQDISKYLNWYQQKPGQAPRLLIYHTSRLHSGIPARFSGSGSGTDYTLTISSLQPEDFAVYFCQQGNTLPYTFGQGTKLEIKGGGGSGGGGSGGGGSQVQLQESGPGLVKPSETLSLTCTVSGVSLPDYGVSWIRQPPGKGLEWIGVIWGSETTYYSSSLKSRVTISKDNSKNQVSLKLSSVTAADTAVYYCAKHYYYGGSYAMDYWGQGTLVTVSSHHHHHHHH

SEQ ID NO: 896 - DNA, 1458 bp, Artificial Sequence
  source: /note="Description of Artificial Sequence: Synthetic polynucleotide"
atggccctccctgtcaccgccctgctgcttccgctggctcttctgctccacgccgctcggcccgaaattgtgatgacccagtcacccgccactcttagcctttcacccggtgagcgcgcaaccctgtcttgcagagcctcccaagacatctcaaaataccttaattggtatcaacagaagcccggacaggctcctcgccttctgatctaccacaccagccggctccattctggaatccctgccaggttcagcggtagcggatctgggaccgactacaccctcactatcagctcactgcagccagaggacttcgctgtctatttctgtcagcaagggaacaccctgccctacacctttggacagggcaccaagctcgagattaaaggtggaggtggcagcggaggaggtgggtccggcggtggaggaagccaggtccaactccaagaaagcggaccgggtcttgtgaagccatcagaaactctttcactgacttgtactgtgagcggagtgtctctccccgattacggggtgtcttggatcagacagccaccggggaagggtctggaatggattggagtgatttggggctctgagactacttactactcttcatccctcaagtcacgcgtcaccatctcaaaggacaactctaagaatcaggtgtcactgaaactgtcatctgtgaccgcagccgacaccgccgtgtactattgcgctaagcattactattatggcgggagctacgcaatggattactggggacagggtactctggtcaccgtgtccagcaccactaccccagcaccgaggccacccaccccggctcctaccatcgcctcccagcctctgtccctgcgtccggaggcatgtagacccgcagctggtggggccgtgcatacccggggtcttgacttcgcctgcgatatctacatttgggcccctctggctggtacttgcggggtcctgctgctttcactcgtgatcactctttactgtaagcgcggtcggaagaagctgctgtacatctttaagcaacccttcatgaggcctgtgcagactactcaagaggaggacggctgttcatgccggttcccagaggaggaggaaggcggctgcgaactgcgcgtgaaattcagccgcagcgcagatgctccagcctacaagcaggggcagaaccagctctacaacgaactcaatcttggtcggagagaggagtacgacgtgctggacaagcggagaggacgggacccagaaatgggcgggaagccgcgcagaaagaatccccaagagggcctgtacaacgagctccaaaaggataagatggcagaagcctatagcgagattggtatgaaaggggaacgcagaagaggcaaaggccacgacggactgtaccagggactcagcaccgccaccaaggacacctatgacgctcttcacatgcaggccctgccgcctcgg

SEQ ID NO: 897 - protein, 486 aa, Artificial Sequence
  source: /note="Description of Artificial Sequence: Synthetic polypeptide"
MALPVTALLLPLALLLHAARPEIVMTQSPATLSLSPGERATLSCRASQDISKYLNWYQQKPGQAPRLLIYHTSRLHSGIPARFSGSGSGTDYTLTISSLQPEDFAVYFCQQGNTLPYTFGQGTKLEIKGGGGSGGGGSGGGGSQVQLQESGPGLVKPSETLSLTCTVSGVSLPDYGVSWIRQPPGKGLEWIGVIWGSETTYYSSSLKSRVTISKDNSKNQVSLKLSSVTAADTAVYYCAKHYYYGGSYAMDYWGQGTLVTVSSTTTPAPRPPTPAPTIASQPLSLRPEACRPAAGGAVHTRGLDFACDIYIWAPLAGTCGVLLLSLVITLYCKRGRKKLLYIFKQPFMRPVQTTQEEDGCSCRFPEEEEGGCELRVKFSRSADAPAYKQGQNQLYNELNLGRREEYDVLDKRRGRDPEMGGKPRRKNPQEGLYNELQKDKMAEAYSEIGMKGERRRGKGHDGLYQGLSTATKDTYDALHMQALPPR

SEQ ID NO: 898 - protein, 242 aa, Artificial Sequence
  source: /note="Description of Artificial Sequence: Synthetic polypeptide"
EIVMTQSPATLSLSPGERATLSCRASQDISKYLNWYQQKPGQAPRLLIYHTSRLHSGIPARFSGSGSGTDYTLTISSLQPEDFAVYFCQQGNTLPYTFGQGTKLEIKGGGGSGGGGSGGGGSQVQLQESGPGLVKPSETLSLTCTVSGVSLPDYGVSWIRQPPGKGLEWIGVIWGSETTYYQSSLKSRVTISKDNSKNQVSLKLSSVTAADTAVYYCAKHYYYGGSYAMDYWGQGTLVTVSS

SEQ ID NO: 899 - DNA, 813 bp, Artificial Sequence
  source: /note="Description of Artificial Sequence: Synthetic polynucleotide"
atggccctccctgtcaccgccctgctgcttccgctggctcttctgctccacgccgctcggcccgaaattgtgatgacccagtcacccgccactcttagcctttcacccggtgagcgcgcaaccctgtcttgcagagcctcccaagacatctcaaaataccttaattggtatcaacagaagcccggacaggctcctcgccttctgatctaccacaccagccggctccattctggaatccctgccaggttcagcggtagcggatctgggaccgactacaccctcactatcagctcactgcagccagaggacttcgctgtctatttctgtcagcaagggaacaccctgccctacacctttggacagggcaccaagctcgagattaaaggtggaggtggcagcggaggaggtgggtccggcggtggaggaagccaggtccaactccaagaaagcggaccgggtcttgtgaagccatcagaaactctttcactgacttgtactgtgagcggagtgtctctccccgattacggggtgtcttggatcagacagccaccggggaagggtctggaatggattggagtgatttggggctctgagactacttactaccaatcatccctcaagtcacgcgtcaccatctcaaaggacaactctaagaatcaggtgtcactgaaactgtcatctgtgaccgcagccgacaccgccgtgtactattgcgctaagcattactattatggcgggagctacgcaatggattactggggacagggtactctggtcaccgtgtccagccaccaccatcatcaccatcaccat

SEQ ID NO: 900 - protein, 271 aa, Artificial Sequence
  source: /note="Description of Artificial Sequence: Synthetic polypeptide"
MALPVTALLLPLALLLHAARPEIVMTQSPATLSLSPGERATLSCRASQDISKYLNWYQQKPGQAPRLLIYHTSRLHSGIPARFSGSGSGTDYTLTISSLQPEDFAVYFCQQGNTLPYTFGQGTKLEIKGGGGSGGGGSGGGGSQVQLQESGPGLVKPSETLSLTCTVSGVSLPDYGVSWIRQPPGKGLEWIGVIWGSETTYYQSSLKSRVTISKDNSKNQVSLKLSSVTAADTAVYYCAKHYYYGGSYAMDYWGQGTLVTVSSHHHHHHHH

SEQ ID NO: 901 - DNA, 1458 bp, Artificial Sequence
  source: /note="Description of Artificial Sequence: Synthetic polynucleotide"
atggccctccctgtcaccgccctgctgcttccgctggctcttctgctccacgccgctcggcccgaaattgtgatgacccagtcacccgccactcttagcctttcacccggtgagcgcgcaaccctgtcttgcagagcctcccaagacatctcaaaataccttaattggtatcaacagaagcccggacaggctcctcgccttctgatctaccacaccagccggctccattctggaatccctgccaggttcagcggtagcggatctgggaccgactacaccctcactatcagctcactgcagccagaggacttcgctgtctatttctgtcagcaagggaacaccctgccctacacctttggacagggcaccaagctcgagattaaaggtggaggtggcagcggaggaggtgggtccggcggtggaggaagccaggtccaactccaagaaagcggaccgggtcttgtgaagccatcagaaactctttcactgacttgtactgtgagcggagtgtctctccccgattacggggtgtcttggatcagacagccaccggggaagggtctggaatggattggagtgatttggggctctgagactacttactaccaatcatccctcaagtcacgcgtcaccatctcaaaggacaactctaagaatcaggtgtcactgaaactgtcatctgtgaccgcagccgacaccgccgtgtactattgcgctaagcattactattatggcgggagctacgcaatggattactggggacagggtactctggtcaccgtgtccagcaccactaccccagcaccgaggccacccaccccggctcctaccatcgcctcccagcctctgtccctgcgtccggaggcatgtagacccgcagctggtggggccgtgcatacccggggtcttgacttcgcctgcgatatctacatttgggcccctctggctggtacttgcggggtcctgctgctttcactcgtgatcactctttactgtaagcgcggtcggaagaagctgctgtacatctttaagcaacccttcatgaggcctgtgcagactactcaagaggaggacggctgttcatgccggttcccagaggaggaggaaggcggctgcgaactgcgcgtgaaattcagccgcagcgcagatgctccagcctacaagcaggggcagaaccagctctacaacgaactcaatcttggtcggagagaggagtacgacgtgctggacaagcggagaggacgggacccagaaatgggcgggaagccgcgcagaaagaatccccaagagggcctgtacaacgagctccaaaaggataagatggcagaagcctatagcgagattggtatgaaaggggaacgcagaagaggcaaaggccacgacggactgtaccagggactcagcaccgccaccaaggacacctatgacgctcttcacatgcaggccctgccgcctcgg

SEQ ID NO: 902 - protein, 486 aa, Artificial Sequence
  source: /note="Description of Artificial Sequence: Synthetic polypeptide"
MALPVTALLLPLALLLHAARPEIVMTQSPATLSLSPGERATLSCRASQDISKYLNWYQQKPGQAPRLLIYHTSRLHSGIPARFSGSGSGTDYTLTISSLQPEDFAVYFCQQGNTLPYTFGQGTKLEIKGGGGSGGGGSGGGGSQVQLQESGPGLVKPSETLSLTCTVSGVSLPDYGVSWIRQPPGKGLEWIGVIWGSETTYYQSSLKSRVTISKDNSKNQVSLKLSSVTAADTAVYYCAKHYYYGGSYAMDYWGQGTLVTVSSTTTPAPRPPTPAPTIASQPLSLRPEACRPAAGGAVHTRGLDFACDIYIWAPLAGTCGVLLLSLVITLYCKRGRKKLLYIFKQPFMRPVQTTQEEDGCSCRFPEEEEGGCELRVKFSRSADAPAYKQGQNQLYNELNLGRREEYDVLDKRRGRDPEMGGKPRRKNPQEGLYNELQKDKMAEAYSEIGMKGERRRGKGHDGLYQGLSTATKDTYDALHMQALPPR

SEQ ID NO: 903 - protein, 242 aa, Artificial Sequence
  source: /note="Description of Artificial Sequence: Synthetic polypeptide"
QVQLQESGPGLVKPSETLSLTCTVSGVSLPDYGVSWIRQPPGKGLEWIGVIWGSETTYYSSSLKSRVTISKDNSKNQVSLKLSSVTAADTAVYYCAKHYYYGGSYAMDYWGQGTLVTVSSGGGGSGGGGSGGGGSEIVMTQSPATLSLSPGERATLSCRASQDISKYLNWYQQKPGQAPRLLIYHTSRLHSGIPARFSGSGSGTDYTLTISSLQPEDFAVYFCQQGNTLPYTFGQGTKLEIK

SEQ ID NO: 904 - DNA, 813 bp, Artificial Sequence
  source: /note="Description of Artificial Sequence: Synthetic polynucleotide"
atggctctgcccgtgaccgcactcctcctgccactggctctgctgcttcacgccgctcgcccacaagtccagcttcaagaatcagggcctggtctggtgaagccatctgagactctgtccctcacttgcaccgtgagcggagtgtccctcccagactacggagtgagctggattagacagcctcccggaaagggactggagtggatcggagtgatttggggtagcgaaaccacttactattcatcttccctgaagtcacgggtcaccatttcaaaggataactcaaagaatcaagtgagcctcaagctctcatcagtcaccgccgctgacaccgccgtgtattactgtgccaagcattactactatggagggtcctacgccatggactactggggccagggaactctggtcactgtgtcatctggtggaggaggtagcggaggaggcgggagcggtggaggtggctccgaaatcgtgatgacccagagccctgcaaccctgtccctttctcccggggaacgggctaccctttcttgtcgggcatcacaagatatctcaaaatacctcaattggtatcaacagaagccgggacaggcccctaggcttcttatctaccacacctctcgcctgcatagcgggattcccgcacgctttagcgggtctggaagcgggaccgactacactctgaccatctcatctctccagcccgaggacttcgccgtctacttctgccagcagggtaacaccctgccgtacaccttcggccagggcaccaagcttgagatcaaacatcaccaccatcatcaccatcac

SEQ ID NO: 905 - protein, 271 aa, Artificial Sequence
  source: /note="Description of Artificial Sequence: Synthetic polypeptide"
MALPVTALLLPLALLLHAARPQVQLQESGPGLVKPSETLSLTCTVSGVSLPDYGVSWIRQPPGKGLEWIGVIWGSETTYYSSSLKSRVTISKDNSKNQVSLKLSSVTAADTAVYYCAKHYYYGGSYAMDYWGQGTLVTVSSGGGGSGGGGSGGGGSEIVMTQSPATLSLSPGERATLSCRASQDISKYLNWYQQKPGQAPRLLIYHTSRLHSGIPARFSGSGSGTDYTLTISSLQPEDFAVYFCQQGNTLPYTFGQGTKLEIKHHHHHHHH

SEQ ID NO: 906 - DNA, 1458 bp, Artificial Sequence
  source: /note="Description of Artificial Sequence: Synthetic polynucleotide"
atggctctgcccgtgaccgcactcctcctgccactggctctgctgcttcacgccgctcgcccacaagtccagcttcaagaatcagggcctggtctggtgaagccatctgagactctgtccctcacttgcaccgtgagcggagtgtccctcccagactacggagtgagctggattagacagcctcccggaaagggactggagtggatcggagtgatttggggtagcgaaaccacttactattcatcttccctgaagtcacgggtcaccatttcaaaggataactcaaagaatcaagtgagcctcaagctctcatcagtcaccgccgctgacaccgccgtgtattactgtgccaagcattactactatggagggtcctacgccatggactactggggccagggaactctggtcactgtgtcatctggtggaggaggtagcggaggaggcgggagcggtggaggtggctccgaaatcgtgatgacccagagccctgcaaccctgtccctttctcccggggaacgggctaccctttcttgtcgggcatcacaagatatctcaaaatacctcaattggtatcaacagaagccgggacaggcccctaggcttcttatctaccacacctctcgcctgcatagcgggattcccgcacgctttagcgggtctggaagcgggaccgactacactctgaccatctcatctctccagcccgaggacttcgccgtctacttctgccagcagggtaacaccctgccgtacaccttcggccagggcaccaagcttgagatcaaaaccactactcccgctccaaggccacccacccctgccccgaccatcgcctctcagccgctttccctgcgtccggaggcatgtagacccgcagctggtggggccgtgcatacccggggtcttgacttcgcctgcgatatctacatttgggcccctctggctggtacttgcggggtcctgctgctttcactcgtgatcactctttactgtaagcgcggtcggaagaagctgctgtacatctttaagcaacccttcatgaggcctgtgcagactactcaagaggaggacggctgttcatgccggttcccagaggaggaggaaggcggctgcgaactgcgcgtgaaattcagccgcagcgcagatgctccagcctacaagcaggggcagaaccagctctacaacgaactcaatcttggtcggagagaggagtacgacgtgctggacaagcggagaggacgggacccagaaatgggcgggaagccgcgcagaaagaatccccaagagggcctgtacaacgagctccaaaaggataagatggcagaagcctatagcgagattggtatgaaaggggaacgcagaagaggcaaaggccacgacggactgtaccagggactcagcaccgccaccaaggacacctatgacgctcttcacatgcaggccctgccgcctcgg

SEQ ID NO: 907 - protein, 486 aa, Artificial Sequence
  source: /note="Description of Artificial Sequence: Synthetic polypeptide"
MALPVTALLLPLALLLHAARPQVQLQESGPGLVKPSETLSLTCTVSGVSLPDYGVSWIRQPPGKGLEWIGVIWGSETTYYSSSLKSRVTISKDNSKNQVSLKLSSVTAADTAVYYCAKHYYYGGSYAMDYWGQGTLVTVSSGGGGSGGGGSGGGGSEIVMTQSPATLSLSPGERATLSCRASQDISKYLNWYQQKPGQAPRLLIYHTSRLHSGIPARFSGSGSGTDYTLTISSLQPEDFAVYFCQQGNTLPYTFGQGTKLEIKTTTPAPRPPTPAPTIASQPLSLRPEACRPAAGGAVHTRGLDFACDIYIWAPLAGTCGVLLLSLVITLYCKRGRKKLLYIFKQPFMRPVQTTQEEDGCSCRFPEEEEGGCELRVKFSRSADAPAYKQGQNQLYNELNLGRREEYDVLDKRRGRDPEMGGKPRRKNPQEGLYNELQKDKMAEAYSEIGMKGERRRGKGHDGLYQGLSTATKDTYDALHMQALPPR

SEQ ID NO: 908 - protein, 242 aa, Artificial Sequence
  source: /note="Description of Artificial Sequence: Synthetic polypeptide"
QVQLQESGPGLVKPSETLSLTCTVSGVSLPDYGVSWIRQPPGKGLEWIGVIWGSETTYYQSSLKSRVTISKDNSKNQVSLKLSSVTAADTAVYYCAKHYYYGGSYAMDYWGQGTLVTVSSGGGGSGGGGSGGGGSEIVMTQSPATLSLSPGERATLSCRASQDISKYLNWYQQKPGQAPRLLIYHTSRLHSGIPARFSGSGSGTDYTLTISSLQPEDFAVYFCQQGNTLPYTFGQGTKLEIK

SEQ ID NO: 909 - DNA, 813 bp, Artificial Sequence
  source: /note="Description of Artificial Sequence: Synthetic polynucleotide"
atggctctgcccgtgaccgcactcctcctgccactggctctgctgcttcacgccgctcgcccacaagtccagcttcaagaatcagggcctggtctggtgaagccatctgagactctgtccctcacttgcaccgtgagcggagtgtccctcccagactacggagtgagctggattagacagcctcccggaaagggactggagtggatcggagtgatttggggtagcgaaaccacttactatcaatcttccctgaagtcacgggtcaccatttcaaaggataactcaaagaatcaagtgagcctcaagctctcatcagtcaccgccgctgacaccgccgtgtattactgtgccaagcattactactatggagggtcctacgccatggactactggggccagggaactctggtcactgtgtcatctggtggaggaggtagcggaggaggcgggagcggtggaggtggctccgaaatcgtgatgacccagagccctgcaaccctgtccctttctcccggggaacgggctaccctttcttgtcgggcatcacaagatatctcaaaatacctcaattggtatcaacagaagccgggacaggcccctaggcttcttatctaccacacctctcgcctgcatagcgggattcccgcacgctttagcgggtctggaagcgggaccgactacactctgaccatctcatctctccagcccgaggacttcgccgtctacttctgccagcagggtaacaccctgccgtacaccttcggccagggcaccaagcttgagatcaaacatcaccaccatcatcaccatcac

SEQ ID NO: 910 - protein, 271 aa, Artificial Sequence
  source: /note="Description of Artificial Sequence: Synthetic polypeptide"
MALPVTALLLPLALLLHAARPQVQLQESGPGLVKPSETLSLTCTVSGVSLPDYGVSWIRQPPGKGLEWIGVIWGSETTYYQSSLKSRVTISKDNSKNQVSLKLSSVTAADTAVYYCAKHYYYGGSYAMDYWGQGTLVTVSSGGGGSGGGGSGGGGSEIVMTQSPATLSLSPGERATLSCRASQDISKYLNWYQQKPGQAPRLLIYHTSRLHSGIPARFSGSGSGTDYTLTISSLQPEDFAVYFCQQGNTLPYTFGQGTKLEIKHHHHHHHH

SEQ ID NO: 911 - DNA, 1458 bp, Artificial Sequence
  source: /note="Description of Artificial Sequence: Synthetic polynucleotide"
atggctctgcccgtgaccgcactcctcctgccactggctctgctgcttcacgccgctcgcccacaagtccagcttcaagaatcagggcctggtctggtgaagccatctgagactctgtccctcacttgcaccgtgagcggagtgtccctcccagactacggagtgagctggattagacagcctcccggaaagggactggagtggatcggagtgatttggggtagcgaaaccacttactatcaatcttccctgaagtcacgggtcaccatttcaaaggataactcaaagaatcaagtgagcctcaagctctcatcagtcaccgccgctgacaccgccgtgtattactgtgccaagcattactactatggagggtcctacgccatggactactggggccagggaactctggtcactgtgtcatctggtggaggaggtagcggaggaggcgggagcggtggaggtggctccgaaatcgtgatgacccagagccctgcaaccctgtccctttctcccggggaacgggctaccctttcttgtcgggcatcacaagatatctcaaaatacctcaattggtatcaacagaagccgggacaggcccctaggcttcttatctaccacacctctcgcctgcatagcgggattcccgcacgctttagcgggtctggaagcgggaccgactacactctgaccatctcatctctccagcccgaggacttcgccgtctacttctgccagcagggtaacaccctgccgtacaccttcggccagggcaccaagcttgagatcaaaaccactactcccgctccaaggccacccacccctgccccgaccatcgcctctcagccgctttccctgcgtccggaggcatgtagacccgcagctggtggggccgtgcatacccggggtcttgacttcgcctgcgatatctacatttgggcccctctggctggtacttgcggggtcctgctgctttcactcgtgatcactctttactgtaagcgcggtcggaagaagctgctgtacatctttaagcaacccttcatgaggcctgtgcagactactcaagaggaggacggctgttcatgccggttcccagaggaggaggaaggcggctgcgaactgcgcgtgaaattcagccgcagcgcagatgctccagcctacaagcaggggcagaaccagctctacaacgaactcaatcttggtcggagagaggagtacgacgtgctggacaagcggagaggacgggacccagaaatgggcgggaagccgcgcagaaagaatccccaagagggcctgtacaacgagctccaaaaggataagatggcagaagcctatagcgagattggtatgaaaggggaacgcagaagaggcaaaggccacgacggactgtaccagggactcagcaccgccaccaaggacacctatgacgctcttcacatgcaggccctgccgcctcgg

SEQ ID NO: 912 - protein, 486 aa, Artificial Sequence
  source: /note="Description of Artificial Sequence: Synthetic polypeptide"
MALPVTALLLPLALLLHAARPQVQLQESGPGLVKPSETLSLTCTVSGVSLPDYGVSWIRQPPGKGLEWIGVIWGSETTYYQSSLKSRVTISKDNSKNQVSLKLSSVTAADTAVYYCAKHYYYGGSYAMDYWGQGTLVTVSSGGGGSGGGGSGGGGSEIVMTQSPATLSLSPGERATLSCRASQDISKYLNWYQQKPGQAPRLLIYHTSRLHSGIPARFSGSGSGTDYTLTISSLQPEDFAVYFCQQGNTLPYTFGQGTKLEIKTTTPAPRPPTPAPTIASQPLSLRPEACRPAAGGAVHTRGLDFACDIYIWAPLAGTCGVLLLSLVITLYCKRGRKKLLYIFKQPFMRPVQTTQEEDGCSCRFPEEEEGGCELRVKFSRSADAPAYKQGQNQLYNELNLGRREEYDVLDKRRGRDPEMGGKPRRKNPQEGLYNELQKDKMAEAYSEIGMKGERRRGKGHDGLYQGLSTATKDTYDALHMQALPPR

SEQ ID NO: 913 - protein, 247 aa, Artificial Sequence
  source: /note="Description of Artificial Sequence: Synthetic polypeptide"
EIVMTQSPATLSLSPGERATLSCRASQDISKYLNWYQQKPGQAPRLLIYHTSRLHSGIPARFSGSGSGTDYTLTISSLQPEDFAVYFCQQGNTLPYTFGQGTKLEIKGGGGSGGGGSGGGGSGGGGSQVQLQESGPGLVKPSETLSLTCTVSGVSLPDYGVSWIRQPPGKGLEWIGVIWGSETTYYSSSLKSRVTISKDNSKNQVSLKLSSVTAADTAVYYCAKHYYYGGSYAMDYWGQGTLVTVSS

SEQ ID NO: 914 - DNA, 828 bp, Artificial Sequence
  source: /note="Description of Artificial Sequence: Synthetic polynucleotide"
atggccctcccagtgaccgctctgctgctgcctctcgcacttcttctccatgccgctcggcctgagatcgtcatgacccaaagccccgctaccctgtccctgtcacccggcgagagggcaaccctttcatgcagggccagccaggacatttctaagtacctcaactggtatcagcagaagccagggcaggctcctcgcctgctgatctaccacaccagccgcctccacagcggtatccccgccagattttccgggagcgggtctggaaccgactacaccctcaccatctcttctctgcagcccgaggatttcgccgtctatttctgccagcaggggaatactctgccgtacaccttcggtcaaggtaccaagctggaaatcaagggaggcggaggatcaggcggtggcggaagcggaggaggtggctccggaggaggaggttcccaagtgcagcttcaagaatcaggacccggacttgtgaagccatcagaaaccctctccctgacttgtaccgtgtccggtgtgagcctccccgactacggagtctcttggattcgccagcctccggggaagggtcttgaatggattggggtgatttggggatcagagactacttactactcttcatcacttaagtcacgggtcaccatcagcaaagataatagcaagaaccaagtgtcacttaagctgtcatctgtgaccgccgctgacaccgccgtgtactattgtgccaaacattactattacggagggtcttatgctatggactactggggacaggggaccctggtgactgtctctagccatcaccatcaccaccatcatcac

SEQ ID NO: 915 - protein, 276 aa, Artificial Sequence
  source: /note="Description of Artificial Sequence: Synthetic polypeptide"
MALPVTALLLPLALLLHAARPEIVMTQSPATLSLSPGERATLSCRASQDISKYLNWYQQKPGQAPRLLIYHTSRLHSGIPARFSGSGSGTDYTLTISSLQPEDFAVYFCQQGNTLPYTFGQGTKLEIKGGGGSGGGGSGGGGSGGGGSQVQLQESGPGLVKPSETLSLTCTVSGVSLPDYGVSWIRQPPGKGLEWIGVIWGSETTYYSSSLKSRVTISKDNSKNQVSLKLSSVTAADTAVYYCAKHYYYGGSYAMDYWGQGTLVTVSSHHHHHHHH

SEQ ID NO: 916 - DNA, 1473 bp, Artificial Sequence
  source: /note="Description of Artificial Sequence: Synthetic polynucleotide"
atggccctccctgtcaccgccctgctgcttccgctggctcttctgctccacgccgctcggcccgaaattgtgatgacccagtcacccgccactcttagcctttcacccggtgagcgcgcaaccctgtcttgcagagcctcccaagacatctcaaaataccttaattggtatcaacagaagcccggacaggctcctcgccttctgatctaccacaccagccggctccattctggaatccctgccaggttcagcggtagcggatctgggaccgactacaccctcactatcagctcactgcagccagaggacttcgctgtctatttctgtcagcaagggaacaccctgccctacacctttggacagggcaccaagctcgagattaaaggtggaggtggcagcggaggaggtgggtccggcggtggaggaagcggcggaggcgggagccaggtccaactccaagaaagcggaccgggtcttgtgaagccatcagaaactctttcactgacttgtactgtgagcggagtgtctctccccgattacggggtgtcttggatcagacagccaccggggaagggtctggaatggattggagtgatttggggctctgagactacttactactcttcatccctcaagtcacgcgtcaccatctcaaaggacaactctaagaatcaggtgtcactgaaactgtcatctgtgaccgcagccgacaccgccgtgtactattgcgctaagcattactattatggcgggagctacgcaatggattactggggacagggtactctggtcaccgtgtccagcaccactaccccagcaccgaggccacccaccccggctcctaccatcgcctcccagcctctgtccctgcgtccggaggcatgtagacccgcagctggtggggccgtgcatacccggggtcttgacttcgcctgcgatatctacatttgggcccctctggctggtacttgcggggtcctgctgctttcactcgtgatcactctttactgtaagcgcggtcggaagaagctgctgtacatctttaagcaacccttcatgaggcctgtgcagactactcaagaggaggacggctgttcatgccggttcccagaggaggaggaaggcggctgcgaactgcgcgtgaaattcagccgcagcgcagatgctccagcctacaagcaggggcagaaccagctctacaacgaactcaatcttggtcggagagaggagtacgacgtgctggacaagcggagaggacgggacccagaaatgggcgggaagccgcgcagaaagaatccccaagagggcctgtacaacgagctccaaaaggataagatggcagaagcctatagcgagattggtatgaaaggggaacgcagaagaggcaaaggccacgacggactgtaccagggactcagcaccgccaccaaggacacctatgacgctcttcacatgcaggccctgccgcctcgg

SEQ ID NO: 917 - protein, 491 aa, Artificial Sequence
  source: /note="Description of Artificial Sequence: Synthetic polypeptide"
MALPVTALLLPLALLLHAARPEIVMTQSPATLSLSPGERATLSCRASQDISKYLNWYQQKPGQAPRLLIYHTSRLHSGIPARFSGSGSGTDYTLTISSLQPEDFAVYFCQQGNTLPYTFGQGTKLEIKGGGGSGGGGSGGGGSGGGGSQVQLQESGPGLVKPSETLSLTCTVSGVSLPDYGVSWIRQPPGKGLEWIGVIWGSETTYYSSSLKSRVTISKDNSKNQVSLKLSSVTAADTAVYYCAKHYYYGGSYAMDYWGQGTLVTVSSTTTPAPRPPTPAPTIASQPLSLRPEACRPAAGGAVHTRGLDFACDIYIWAPLAGTCGVLLLSLVITLYCKRGRKKLLYIFKQPFMRPVQTTQEEDGCSCRFPEEEEGGCELRVKFSRSADAPAYKQGQNQLYNELNLGRREEYDVLDKRRGRDPEMGGKPRRKNPQEGLYNELQKDKMAEAYSEIGMKGERRRGKGHDGLYQGLSTATKDTYDALHMQALPPR

SEQ ID NO: 918 - protein, 247 aa, Artificial Sequence
  source: /note="Description of Artificial Sequence: Synthetic polypeptide"
EIVMTQSPATLSLSPGERATLSCRASQDISKYLNWYQQKPGQAPRLLIYHTSRLHSGIPARFSGSGSGTDYTLTISSLQPEDFAVYFCQQGNTLPYTFGQGTKLEIKGGGGSGGGGSGGGGSGGGGSQVQLQESGPGLVKPSETLSLTCTVSGVSLPDYGVSWIRQPPGKGLEWIGVIWGSETTYYQSSLKSRVTISKDNSKNQVSLKLSSVTAADTAVYYCAKHYYYGGSYAMDYWGQGTLVTVSS

SEQ ID NO: 919 - DNA, 828 bp, Artificial Sequence
  source: /note="Description of Artificial Sequence: Synthetic polynucleotide"
atggccctcccagtgaccgctctgctgctgcctctcgcacttcttctccatgccgctcggcctgagatcgtcatgacccaaagccccgctaccctgtccctgtcacccggcgagagggcaaccctttcatgcagggccagccaggacatttctaagtacctcaactggtatcagcagaagccagggcaggctcctcgcctgctgatctaccacaccagccgcctccacagcggtatccccgccagattttccgggagcgggtctggaaccgactacaccctcaccatctcttctctgcagcccgaggatttcgccgtctatttctgccagcaggggaatactctgccgtacaccttcggtcaaggtaccaagctggaaatcaagggaggcggaggatcaggcggtggcggaagcggaggaggtggctccggaggaggaggttcccaagtgcagcttcaagaatcaggacccggacttgtgaagccatcagaaaccctctccctgacttgtaccgtgtccggtgtgagcctccccgactacggagtctcttggattcgccagcctccggggaagggtcttgaatggattggggtgatttggggatcagagactacttactaccagtcatcacttaagtcacgggtcaccatcagcaaagataatagcaagaaccaagtgtcacttaagctgtcatctgtgaccgccgctgacaccgccgtgtactattgtgccaaacattactattacggagggtcttatgctatggactactggggacaggggaccctggtgactgtctctagccatcaccatcaccaccatcatcac

SEQ ID NO: 920 - protein, 276 aa, Artificial Sequence
  source: /note="Description of Artificial Sequence: Synthetic polypeptide"
MALPVTALLLPLALLLHAARPEIVMTQSPATLSLSPGERATLSCRASQDISKYLNWYQQKPGQAPRLLIYHTSRLHSGIPARFSGSGSGTDYTLTISSLQPEDFAVYFCQQGNTLPYTFGQGTKLEIKGGGGSGGGGSGGGGSGGGGSQVQLQESGPGLVKPSETLSLTCTVSGVSLPDYGVSWIRQPPGKGLEWIGVIWGSETTYYQSSLKSRVTISKDNSKNQVSLKLSSVTAADTAVYYCAKHYYYGGSYAMDYWGQGTLVTVSSHHHHHHHH

SEQ ID NO: 921 - DNA, 1473 bp, Artificial Sequence
  source: /note="Description of Artificial Sequence: Synthetic polynucleotide"
atggccctccctgtcaccgccctgctgcttccgctggctcttctgctccacgccgctcggcccgaaattgtgatgacccagtcacccgccactcttagcctttcacccggtgagcgcgcaaccctgtcttgcagagcctcccaagacatctcaaaataccttaattggtatcaacagaagcccggacaggctcctcgccttctgatctaccacaccagccggctccattctggaatccctgccaggttcagcggtagcggatctgggaccgactacaccctcactatcagctcactgcagccagaggacttcgctgtctatttctgtcagcaagggaacaccctgccctacacctttggacagggcaccaagctcgagattaaaggtggaggtggcagcggaggaggtgggtccggcggtggaggaagcggaggcggagggagccaggtccaactccaagaaagcggaccgggtcttgtgaagccatcagaaactctttcactgacttgtactgtgagcggagtgtctctccccgattacggggtgtcttggatcagacagccaccggggaagggtctggaatggattggagtgatttggggctctgagactacttactaccaatcatccctcaagtcacgcgtcaccatctcaaaggacaactctaagaatcaggtgtcactgaaactgtcatctgtgaccgcagccgacaccgccgtgtactattgcgctaagcattactattatggcgggagctacgcaatggattactggggacagggtactctggtcaccgtgtccagcaccactaccccagcaccgaggccacccaccccggctcctaccatcgcctcccagcctctgtccctgcgtccggaggcatgtagacccgcagctggtggggccgtgcatacccggggtcttgacttcgcctgcgatatctacatttgggcccctctggctggtacttgcggggtcctgctgctttcactcgtgatcactctttactgtaagcgcggtcggaagaagctgctgtacatctttaagcaacccttcatgaggcctgtgcagactactcaagaggaggacggctgttcatgccggttcccagaggaggaggaaggcggctgcgaactgcgcgtgaaattcagccgcagcgcagatgctccagcctacaagcaggggcagaaccagctctacaacgaactcaatcttggtcggagagaggagtacgacgtgctggacaagcggagaggacgggacccagaaatgggcgggaagccgcgcagaaagaatccccaagagggcctgtacaacgagctccaaaaggataagatggcagaagcctatagcgagattggtatgaaaggggaacgcagaagaggcaaaggccacgacggactgtaccagggactcagcaccgccaccaaggacacctatgacgctcttcacatgcaggccctgccgcctcgg

SEQ ID NO: 922 - protein, 491 aa, Artificial Sequence
  source: /note="Description of Artificial Sequence: Synthetic polypeptide"
MALPVTALLLPLALLLHAARPEIVMTQSPATLSLSPGERATLSCRASQDISKYLNWYQQKPGQAPRLLIYHTSRLHSGIPARFSGSGSGTDYTLTISSLQPEDFAVYFCQQGNTLPYTFGQGTKLEIKGGGGSGGGGSGGGGSGGGGSQVQLQESGPGLVKPSETLSLTCTVSGVSLPDYGVSWIRQPPGKGLEWIGVIWGSETTYYQSSLKSRVTISKDNSKNQVSLKLSSVTAADTAVYYCAKHYYYGGSYAMDYWGQGTLVTVSSTTTPAPRPPTPAPTIASQPLSLRPEACRPAAGGAVHTRGLDFACDIYIWAPLAGTCGVLLLSLVITLYCKRGRKKLLYIFKQPFMRPVQTTQEEDGCSCRFPEEEEGGCELRVKFSRSADAPAYKQGQNQLYNELNLGRREEYDVLDKRRGRDPEMGGKPRRKNPQEGLYNELQKDKMAEAYSEIGMKGERRRGKGHDGLYQGLSTATKDTYDALHMQALPPR

SEQ ID NO: 923 - protein, 247 aa, Artificial Sequence
  source: /note="Description of Artificial Sequence: Synthetic polypeptide"
QVQLQESGPGLVKPSETLSLTCTVSGVSLPDYGVSWIRQPPGKGLEWIGVIWGSETTYYSSSLKSRVTISKDNSKNQVSLKLSSVTAADTAVYYCAKHYYYGGSYAMDYWGQGTLVTVSSGGGGSGGGGSGGGGSGGGGSEIVMTQSPATLSLSPGERATLSCRASQDISKYLNWYQQKPGQAPRLLIYHTSRLHSGIPARFSGSGSGTDYTLTISSLQPEDFAVYFCQQGNTLPYTFGQGTKLEIK

SEQ ID NO: 924 - DNA, 828 bp, Artificial Sequence
  source: /note="Description of Artificial Sequence: Synthetic polynucleotide"
atggcactgcctgtcactgccctcctgctgcctctggccctccttctgcatgccgccaggccccaagtccagctgcaagagtcaggacccggactggtgaagccgtctgagactctctcactgacttgtaccgtcagcggcgtgtccctccccgactacggagtgtcatggatccgccaacctcccgggaaagggcttgaatggattggtgtcatctggggttctgaaaccacctactactcatcttccctgaagtccagggtgaccatcagcaaggataattccaagaaccaggtcagccttaagctgtcatctgtgaccgctgctgacaccgccgtgtattactgcgccaagcactactattacggaggaagctacgctatggactattggggacagggcactctcgtgactgtgagcagcggcggtggagggtctggaggtggaggatccggtggtggtgggtcaggcggaggagggagcgagattgtgatgactcagtcaccagccaccctttctctttcacccggcgagagagcaaccctgagctgtagagccagccaggacatttctaagtacctcaactggtatcagcaaaaaccggggcaggcccctcgcctcctgatctaccatacctcacgccttcactctggtatccccgctcggtttagcggatcaggatctggtaccgactacactctgaccatttccagcctgcagccagaagatttcgcagtgtatttctgccagcagggcaatacccttccttacaccttcggtcagggaaccaagctcgaaatcaagcaccatcaccatcatcaccaccat

SEQ ID NO: 925 - protein, 276 aa, Artificial Sequence
  source: /note="Description of Artificial Sequence: Synthetic polypeptide"
MALPVTALLLPLALLLHAARPQVQLQESGPGLVKPSETLSLTCTVSGVSLPDYGVSWIRQPPGKGLEWIGVIWGSETTYYSSSLKSRVTISKDNSKNQVSLKLSSVTAADTAVYYCAKHYYYGGSYAMDYWGQGTLVTVSSGGGGSGGGGSGGGGSGGGGSEIVMTQSPATLSLSPGERATLSCRASQDISKYLNWYQQKPGQAPRLLIYHTSRLHSGIPARFSGSGSGTDYTLTISSLQPEDFAVYFCQQGNTLPYTFGQGTKLEIKHHHHHHHH

SEQ ID NO: 926 - DNA, 1473 bp, Artificial Sequence
  source: /note="Description of Artificial Sequence: Synthetic polynucleotide"
atggctctgcccgtgaccgcactcctcctgccactggctctgctgcttcacgccgctcgcccacaagtccagcttcaagaatcagggcctggtctggtgaagccatctgagactctgtccctcacttgcaccgtgagcggagtgtccctcccagactacggagtgagctggattagacagcctcccggaaagggactggagtggatcggagtgatttggggtagcgaaaccacttactattcatcttccctgaagtcacgggtcaccatttcaaaggataactcaaagaatcaagtgagcctcaagctctcatcagtcaccgccgctgacaccgccgtgtattactgtgccaagcattactactatggagggtcctacgccatggactactggggccagggaactctggtcactgtgtcatctggtggaggaggtagcggaggaggcgggagcggtggaggtggctccggaggtggcggaagcgaaatcgtgatgacccagagccctgcaaccctgtccctttctcccggggaacgggctaccctttcttgtcgggcatcacaagatatctcaaaatacctcaattggtatcaacagaagccgggacaggcccctaggcttcttatctaccacacctctcgcctgcatagcgggattcccgcacgctttagcgggtctggaagcgggaccgactacactctgaccatctcatctctccagcccgaggacttcgccgtctacttctgccagcagggtaacaccctgccgtacaccttcggccagggcaccaagcttgagatcaaaaccactactcccgctccaaggccacccacccctgccccgaccatcgcctctcagccgctttccctgcgtccggaggcatgtagacccgcagctggtggggccgtgcatacccggggtcttgacttcgcctgcgatatctacatttgggcccctctggctggtacttgcggggtcctgctgctttcactcgtgatcactctttactgtaagcgcggtcggaagaagctgctgtacatctttaagcaacccttcatgaggcctgtgcagactactcaagaggaggacggctgttcatgccggttcccagaggaggaggaaggcggctgcgaactgcgcgtgaaattcagccgcagcgcagatgctccagcctacaagcaggggcagaaccagctctacaacgaactcaatcttggtcggagagaggagtacgacgtgctggacaagcggagaggacgggacccagaaatgggcgggaagccgcgcagaaagaatccccaagagggcctgtacaacgagctccaaaaggataagatggcagaagcctatagcgagattggtatgaaaggggaacgcagaagaggcaaaggccacgacggactgtaccagggactcagcaccgccaccaaggacacctatgacgctcttcacatgcaggccctgccgcctcgg

SEQ ID NO: 927 - protein, 491 aa, Artificial Sequence
  source: /note="Description of Artificial Sequence: Synthetic polypeptide"
MALPVTALLLPLALLLHAARPQVQLQESGPGLVKPSETLSLTCTVSGVSLPDYGVSWIRQPPGKGLEWIGVIWGSETTYYSSSLKSRVTISKDNSKNQVSLKLSSVTAADTAVYYCAKHYYYGGSYAMDYWGQGTLVTVSSGGGGSGGGGSGGGGSGGGGSEIVMTQSPATLSLSPGERATLSCRASQDISKYLNWYQQKPGQAPRLLIYHTSRLHSGIPARFSGSGSGTDYTLTISSLQPEDFAVYFCQQGNTLPYTFGQGTKLEIKTTTPAPRPPTPAPTIASQPLSLRPEACRPAAGGAVHTRGLDFACDIYIWAPLAGTCGVLLLSLVITLYCKRGRKKLLYIFKQPFMRPVQTTQEEDGCSCRFPEEEEGGCELRVKFSRSADAPAYKQGQNQLYNELNLGRREEYDVLDKRRGRDPEMGGKPRRKNPQEGLYNELQKDKMAEAYSEIGMKGERRRGKGHDGLYQGLSTATKDTYDALHMQALPPR

SEQ ID NO: 928 - protein, 247 aa, Artificial Sequence
  source: /note="Description of Artificial Sequence: Synthetic polypeptide"
QVQLQESGPGLVKPSETLSLTCTVSGVSLPDYGVSWIRQPPGKGLEWIGVIWGSETTYYQSSLKSRVTISKDNSKNQVSLKLSSVTAADTAVYYCAKHYYYGGSYAMDYWGQGTLVTVSSGGGGSGGGGSGGGGSGGGGSEIVMTQSPATLSLSPGERATLSCRASQDISKYLNWYQQKPGQAPRLLIYHTSRLHSGIPARFSGSGSGTDYTLTISSLQPEDFAVYFCQQGNTLPYTFGQGTKLEIK

SEQ ID NO: 929 - DNA, 828 bp, Artificial Sequence
  source: /note="Description of Artificial Sequence: Synthetic polynucleotide"
atggcactgcctgtcactgccctcctgctgcctctggccctccttctgcatgccgccaggccccaagtccagctgcaagagtcaggacccggactggtgaagccgtctgagactctctcactgacttgtaccgtcagcggcgtgtccctccccgactacggagtgtcatggatccgccaacctcccgggaaagggcttgaatggattggtgtcatctggggttctgaaaccacctactaccagtcttccctgaagtccagggtgaccatcagcaaggataattccaagaaccaggtcagccttaagctgtcatctgtgaccgctgctgacaccgccgtgtattactgcgccaagcactactattacggaggaagctacgctatggactattggggacagggcactctcgtgactgtgagcagcggcggtggagggtctggaggtggaggatccggtggtggtgggtcaggcggaggagggagcgagattgtgatgactcagtcaccagccaccctttctctttcacccggcgagagagcaaccctgagctgtagagccagccaggacatttctaagtacctcaactggtatcagcaaaaaccggggcaggcccctcgcctcctgatctaccatacctcacgccttcactctggtatccccgctcggtttagcggatcaggatctggtaccgactacactctgaccatttccagcctgcagccagaagatttcgcagtgtatttctgccagcagggcaatacccttccttacaccttcggtcagggaaccaagctcgaaatcaagcaccatcaccatcatcatcaccac

SEQ ID NO: 930 - protein, 276 aa, Artificial Sequence
  source: /note="Description of Artificial Sequence: Synthetic polypeptide"
MALPVTALLLPLALLLHAARPQVQLQESGPGLVKPSETLSLTCTVSGVSLPDYGVSWIRQPPGKGLEWIGVIWGSETTYYQSSLKSRVTISKDNSKNQVSLKLSSVTAADTAVYYCAKHYYYGGSYAMDYWGQGTLVTVSSGGGGSGGGGSGGGGSGGGGSEIVMTQSPATLSLSPGERATLSCRASQDISKYLNWYQQKPGQAPRLLIYHTSRLHSGIPARFSGSGSGTDYTLTISSLQPEDFAVYFCQQGNTLPYTFGQGTKLEIKHHHHHHHH

SEQ ID NO: 931 - DNA, 1473 bp, Artificial Sequence
  source: /note="Description of Artificial Sequence: Synthetic polynucleotide"
atggctctgcccgtgaccgcactcctcctgccactggctctgctgcttcacgccgctcgcccacaagtccagcttcaagaatcagggcctggtctggtgaagccatctgagactctgtccctcacttgcaccgtgagcggagtgtccctcccagactacggagtgagctggattagacagcctcccggaaagggactggagtggatcggagtgatttggggtagcgaaaccacttactatcaatcttccctgaagtcacgggtcaccatttcaaaggataactcaaagaatcaagtgagcctcaagctctcatcagtcaccgccgctgacaccgccgtgtattactgtgccaagcattactactatggagggtcctacgccatggactactggggccagggaactctggtcactgtgtcatctggtggaggaggtagcggaggaggcgggagcggtggaggtggctccggaggcggtgggtcagaaatcgtgatgacccagagccctgcaaccctgtccctttctcccggggaacgggctaccctttcttgtcgggcatcacaagatatctcaaaatacctcaattggtatcaacagaagccgggacaggcccctaggcttcttatctaccacacctctcgcctgcatagcgggattcccgcacgctttagcgggtctggaagcgggaccgactacactctgaccatctcatctctccagcccgaggacttcgccgtctacttctgccagcagggtaacaccctgccgtacaccttcggccagggcaccaagcttgagatcaaaaccactactcccgctccaaggccacccacccctgccccgaccatcgcctctcagccgctttccctgcgtccggaggcatgtagacccgcagctggtggggccgtgcatacccggggtcttgacttcgcctgcgatatctacatttgggcccctctggctggtacttgcggggtcctgctgctttcactcgtgatcactctttactgtaagcgcggtcggaagaagctgctgtacatctttaagcaacccttcatgaggcctgtgcagactactcaagaggaggacggctgttcatgccggttcccagaggaggaggaaggcggctgcgaactgcgcgtgaaattcagccgcagcgcagatgctccagcctacaagcaggggcagaaccagctctacaacgaactcaatcttggtcggagagaggagtacgacgtgctggacaagcggagaggacgggacccagaaatgggcgggaagccgcgcagaaagaatccccaagagggcctgtacaacgagctccaaaaggataagatggcagaagcctatagcgagattggtatgaaaggggaacgcagaagaggcaaaggccacgacggactgtaccagggactcagcaccgccaccaaggacacctatgacgctcttcacatgcaggccctgccgcctcgg

SEQ ID NO: 932 - protein, 491 aa, Artificial Sequence
  source: /note="Description of Artificial Sequence: Synthetic polypeptide"
MALPVTALLLPLALLLHAARPQVQLQESGPGLVKPSETLSLTCTVSGVSLPDYGVSWIRQPPGKGLEWIGVIWGSETTYYQSSLKSRVTISKDNSKNQVSLKLSSVTAADTAVYYCAKHYYYGGSYAMDYWGQGTLVTVSSGGGGSGGGGSGGGGSGGGGSEIVMTQSPATLSLSPGERATLSCRASQDISKYLNWYQQKPGQAPRLLIYHTSRLHSGIPARFSGSGSGTDYTLTISSLQPEDFAVYFCQQGNTLPYTFGQGTKLEIKTTTPAPRPPTPAPTIASQPLSLRPEACRPAAGGAVHTRGLDFACDIYIWAPLAGTCGVLLLSLVITLYCKRGRKKLLYIFKQPFMRPVQTTQEEDGCSCRFPEEEEGGCELRVKFSRSADAPAYKQGQNQLYNELNLGRREEYDVLDKRRGRDPEMGGKPRRKNPQEGLYNELQKDKMAEAYSEIGMKGERRRGKGHDGLYQGLSTATKDTYDALHMQALPPR

SEQ ID NO: 933 - protein, 247 aa, Artificial Sequence
  source: /note="Description of Artificial Sequence: Synthetic polypeptide"
EIVMTQSPATLSLSPGERATLSCRASQDISKYLNWYQQKPGQAPRLLIYHTSRLHSGIPARFSGSGSGTDYTLTISSLQPEDFAVYFCQQGNTLPYTFGQGTKLEIKGGGGSGGGGSGGGGSGGGGSQVQLQESGPGLVKPSETLSLTCTVSGVSLPDYGVSWIRQPPGKGLEWIGVIWGSETTYYNSSLKSRVTISKDNSKNQVSLKLSSVTAADTAVYYCAKHYYYGGSYAMDYWGQGTLVTVSS

SEQ ID NO: 934 - DNA, 828 bp, Artificial Sequence
  source: /note="Description of Artificial Sequence: Synthetic polynucleotide"
atggccctcccagtgaccgctctgctgctgcctctcgcacttcttctccatgccgctcggcctgagatcgtcatgacccaaagccccgctaccctgtccctgtcacccggcgagagggcaaccctttcatgcagggccagccaggacatttctaagtacctcaactggtatcagcagaagccagggcaggctcctcgcctgctgatctaccacaccagccgcctccacagcggtatccccgccagattttccgggagcgggtctggaaccgactacaccctcaccatctcttctctgcagcccgaggatttcgccgtctatttctgccagcaggggaatactctgccgtacaccttcggtcaaggtaccaagctggaaatcaagggaggcggaggatcaggcggtggcggaagcggaggaggtggctccggaggaggaggttcccaagtgcagcttcaagaatcaggacccggacttgtgaagccatcagaaaccctctccctgacttgtaccgtgtccggtgtgagcctccccgactacggagtctcttggattcgccagcctccggggaagggtcttgaatggattggggtgatttggggatcagagactacttactacaattcatcacttaagtcacgggtcaccatcagcaaagataatagcaagaaccaagtgtcacttaagctgtcatctgtgaccgccgctgacaccgccgtgtactattgtgccaaacattactattacggagggtcttatgctatggactactggggacaggggaccctggtgactgtctctagccatcaccatcaccaccatcatcac

SEQ ID NO: 935 - protein, 276 aa, Artificial Sequence
  source: /note="Description of Artificial Sequence: Synthetic polypeptide"
MALPVTALLLPLALLLHAARPEIVMTQSPATLSLSPGERATLSCRASQDISKYLNWYQQKPGQAPRLLIYHTSRLHSGIPARFSGSGSGTDYTLTISSLQPEDFAVYFCQQGNTLPYTFGQGTKLEIKGGGGSGGGGSGGGGSGGGGSQVQLQESGPGLVKPSETLSLTCTVSGVSLPDYGVSWIRQPPGKGLEWIGVIWGSETTYYNSSLKSRVTISKDNSKNQVSLKLSSVTAADTAVYYCAKHYYYGGSYAMDYWGQGTLVTVSSHHHHHHHH

SEQ ID NO: 936 - DNA, 1473 bp, Artificial Sequence
  source: /note="Description of Artificial Sequence: Synthetic polynucleotide"
atggccctccctgtcaccgccctgctgcttccgctggctcttctgctccacgccgctcggcccgaaattgtgatgacccagtcacccgccactcttagcctttcacccggtgagcgcgcaaccctgtcttgcagagcctcccaagacatctcaaaataccttaattggtatcaacagaagcccggacaggctcctcgccttctgatctaccacaccagccggctccattctggaatccctgccaggttcagcggtagcggatctgggaccgactacaccctcactatcagctcactgcagccagaggacttcgctgtctatttctgtcagcaagggaacaccctgccctacacctttggacagggcaccaagctcgagattaaaggtggaggtggcagcggaggaggtgggtccggcggtggaggaagcggaggcggtgggagccaggtccaactccaagaaagcggaccgggtcttgtgaagccatcagaaactctttcactgacttgtactgtgagcggagtgtctctccccgattacggggtgtcttggatcagacagccaccggggaagggtctggaatggattggagtgatttggggctctgagactacttactacaactcatccctcaagtcacgcgtcaccatctcaaaggacaactctaagaatcaggtgtcactgaaactgtcatctgtgaccgcagccgacaccgccgtgtactattgcgctaagcattactattatggcgggagctacgcaatggattactggggacagggtactctggtcaccgtgtccagcaccactaccccagcaccgaggccacccaccccggctcctaccatcgcctcccagcctctgtccctgcgtccggaggcatgtagacccgcagctggtggggccgtgcatacccggggtcttgacttcgcctgcgatatctacatttgggcccctctggctggtacttgcggggtcctgctgctttcactcgtgatcactctttactgtaagcgcggtcggaagaagctgctgtacatctttaagcaacccttcatgaggcctgtgcagactactcaagaggaggacggctgttcatgccggttcccagaggaggaggaaggcggctgcgaactgcgcgtgaaattcagccgcagcgcagatgctccagcctacaagcaggggcagaaccagctctacaacgaactcaatcttggtcggagagaggagtacgacgtgctggacaagcggagaggacgggacccagaaatgggcgggaagccgcgcagaaagaatccccaagagggcctgtacaacgagctccaaaaggataagatggcagaagcctatagcgagattggtatgaaaggggaacgcagaagaggcaaaggccacgacggactgtaccagggactcagcaccgccaccaaggacacctatgacgctcttcacatgcaggccctgccgcctcgg

SEQ ID NO: 937 - protein, 491 aa, Artificial Sequence
  source: /note="Description of Artificial Sequence: Synthetic polypeptide"
MALPVTALLLPLALLLHAARPEIVMTQSPATLSLSPGERATLSCRASQDISKYLNWYQQKPGQAPRLLIYHTSRLHSGIPARFSGSGSGTDYTLTISSLQPEDFAVYFCQQGNTLPYTFGQGTKLEIKGGGGSGGGGSGGGGSGGGGSQVQLQESGPGLVKPSETLSLTCTVSGVSLPDYGVSWIRQPPGKGLEWIGVIWGSETTYYNSSLKSRVTISKDNSKNQVSLKLSSVTAADTAVYYCAKHYYYGGSYAMDYWGQGTLVTVSSTTTPAPRPPTPAPTIASQPLSLRPEACRPAAGGAVHTRGLDFACDIYIWAPLAGTCGVLLLSLVITLYCKRGRKKLLYIFKQPFMRPVQTTQEEDGCSCRFPEEEEGGCELRVKFSRSADAPAYKQGQNQLYNELNLGRREEYDVLDKRRGRDPEMGGKPRRKNPQEGLYNELQKDKMAEAYSEIGMKGERRRGKGHDGLYQGLSTATKDTYDALHMQALPPR

SEQ ID NO: 938 - protein, 247 aa, Artificial Sequence
  source: /note="Description of Artificial Sequence: Synthetic polypeptide"
QVQLQESGPGLVKPSETLSLTCTVSGVSLPDYGVSWIRQPPGKGLEWIGVIWGSETTYYNSSLKSRVTISKDNSKNQVSLKLSSVTAADTAVYYCAKHYYYGGSYAMDYWGQGTLVTVSSGGGGSGGGGSGGGGSGGGGSEIVMTQSPATLSLSPGERATLSCRASQDISKYLNWYQQKPGQAPRLLIYHTSRLHSGIPARFSGSGSGTDYTLTISSLQPEDFAVYFCQQGNTLPYTFGQGTKLEIK

SEQ ID NO: 939 - DNA, 828 bp, Artificial Sequence
  source: /note="Description of Artificial Sequence: Synthetic polynucleotide"
atggcactgcctgtcactgccctcctgctgcctctggccctccttctgcatgccgccaggccccaagtccagctgcaagagtcaggacccggactggtgaagccgtctgagactctctcactgacttgtaccgtcagcggcgtgtccctccccgactacggagtgtcatggatccgccaacctcccgggaaagggcttgaatggattggtgtcatctggggttctgaaaccacctactacaactcttccctgaagtccagggtgaccatcagcaaggataattccaagaaccaggtcagccttaagctgtcatctgtgaccgctgctgacaccgccgtgtattactgcgccaagcactactattacggaggaagctacgctatggactattggggacagggcactctcgtgactgtgagcagcggcggtggagggtctggaggtggaggatccggtggtggtgggtcaggcggaggagggagcgagattgtgatgactcagtcaccagccaccctttctctttcacccggcgagagagcaaccctgagctgtagagccagccaggacatttctaagtacctcaactggtatcagcaaaaaccggggcaggcccctcgcctcctgatctaccatacctcacgccttcactctggtatccccgctcggtttagcggatcaggatctggtaccgactacactctgaccatttccagcctgcagccagaagatttcgcagtgtatttctgccagcagggcaatacccttccttacaccttcggtcagggaaccaagctcgaaatcaagcaccatcaccatcatcaccaccat

SEQ ID NO: 940 - protein, 276 aa, Artificial Sequence
  source: /note="Description of Artificial Sequence: Synthetic polypeptide"
MALPVTALLLPLALLLHAARPQVQLQESGPGLVKPSETLSLTCTVSGVSLPDYGVSWIRQPPGKGLEWIGVIWGSETTYYNSSLKSRVTISKDNSKNQVSLKLSSVTAADTAVYYCAKHYYYGGSYAMDYWGQGTLVTVSSGGGGSGGGGSGGGGSGGGGSEIVMTQSPATLSLSPGERATLSCRASQDISKYLNWYQQKPGQAPRLLIYHTSRLHSGIPARFSGSGSGTDYTLTISSLQPEDFAVYFCQQGNTLPYTFGQGTKLEIKHHHHHHHH

SEQ ID NO: 941 - DNA, 1473 bp, Artificial Sequence; identical to SEQ ID NO: 936
  source: /note="Description of Artificial Sequence: Synthetic polynucleotide"

SEQ ID NO: 942 - protein, 491 aa, Artificial Sequence; identical to SEQ ID NO: 937
  source: /note="Description of Artificial Sequence: Synthetic polypeptide"

SEQ ID NO: 943 - protein, 242 aa, Artificial Sequence
  source: /note="Description of Artificial Sequence: Synthetic polypeptide"
EIVMTQSPATLSLSPGERATLSCRASQDISKYLNWYQQKPGQAPRLLIYHTSRLHSGIPARFSGSGSGTDYTLTISSLQPEDFAVYFCQQGNTLPYTFGQGTKLEIKGGGGSGGGGSGGGGSQVQLQESGPGLVKPSETLSLTCTVSGVSLPDYGVSWIRQPPGKGLEWIGVIWGSETTYYNSSLKSRVTISKDNSKNQVSLKLSSVTAADTAVYYCAKHYYYGGSYAMDYWGQGTLVTVSS

SEQ ID NO: 944 - DNA, 813 bp, Artificial Sequence
  source: /note="Description of Artificial Sequence: Synthetic polynucleotide"
atggccctccctgtcaccgccctgctgcttccgctggctcttctgctccacgccgctcggcccgaaattgtgatgacccagtcacccgccactcttagcctttcacccggtgagcgcgcaaccctgtcttgcagagcctcccaagacatctcaaaataccttaattggtatcaacagaagcccggacaggctcctcgccttctgatctaccacaccagccggctccattctggaatccctgccaggttcagcggtagcggatctgggaccgactacaccctcactatcagctcactgcagccagaggacttcgctgtctatttctgtcagcaagggaacaccctgccctacacctttggacagggcaccaagctcgagattaaaggtggaggtggcagcggaggaggtgggtccggcggtggaggaagccaggtccaactccaagaaagcggaccgggtcttgtgaagccatcagaaactctttcactgacttgtactgtgagcggagtgtctctccccgattacggggtgtcttggatcagacagccaccggggaagggtctggaatggattggagtgatttggggctctgagactacttactacaattcatccctcaagtcacgcgtcaccatctcaaaggacaactctaagaatcaggtgtcactgaaactgtcatctgtgaccgcagccgacaccgccgtgtactattgcgctaagcattactattatggcgggagctacgcaatggattactggggacagggtactctggtcaccgtgtccagccaccaccatcatcaccatcaccat

SEQ ID NO: 945 - protein, 271 aa, Artificial Sequence
  source: /note="Description of Artificial Sequence: Synthetic polypeptide"
MALPVTALLLPLALLLHAARPEIVMTQSPATLSLSPGERATLSCRASQDISKYLNWYQQKPGQAPRLLIYHTSRLHSGIPARFSGSGSGTDYTLTISSLQPEDFAVYFCQQGNTLPYTFGQGTKLEIKGGGGSGGGGSGGGGSQVQLQESGPGLVKPSETLSLTCTVSGVSLPDYGVSWIRQPPGKGLEWIGVIWGSETTYYNSSLKSRVTISKDNSKNQVSLKLSSVTAADTAVYYCAKHYYYGGSYAMDYWGQGTLVTVSSHHHHHHHH

SEQ ID NO: 946 - DNA, 1473 bp, Artificial Sequence
  source: /note="Description of Artificial Sequence: Synthetic polynucleotide"
atggctctgcccgtgaccgcactcctcctgccactggctctgctgcttcacgccgctcgcccacaagtccagcttcaagaatcagggcctggtctggtgaagccatctgagactctgtccctcacttgcaccgtgagcggagtgtccctcccagactacggagtgagctggattagacagcctcccggaaagggactggagtggatcggagtgatttggggtagcgaaaccacttactataactcttccctgaagtcacgggtcaccatttcaaaggataactcaaagaatcaagtgagcctcaagctctcatcagtcaccgccgctgacaccgccgtgtattactgtgccaagcattactactatggagggtcctacgccatggactactggggccagggaactctggtcactgtgtcatctggtggaggaggtagcggaggaggcgggagcggtggaggtggctccggaggtggcggaagcgaaatcgtgatgacccagagccctgcaaccctgtccctttctcccggggaacgggctaccctttcttgtcgggcatcacaagatatctcaaaatacctcaattggtatcaacagaagccgggacaggcccctaggcttcttatctaccacacctctcgcctgcatagcgggattcccgcacgctttagcgggtctggaagcgggaccgactacactctgaccatctcatctctccagcccgaggacttcgccgtctacttctgccagcagggtaacaccctgccgtacaccttcggccagggcaccaagcttgagatcaaaaccactactcccgctccaaggccacccacccctgccccgaccatcgcctctcagccgctttccctgcgtccggaggcatgtagacccgcagctggtggggccgtgcatacccggggtcttgacttcgcctgcgatatctacatttgggcccctctggctggtacttgcggggtcctgctgctttcactcgtgatcactctttactgtaagcgcggtcggaagaagctgctgtacatctttaagcaacccttcatgaggcctgtgcagactactcaagaggaggacggctgttcatgccggttcccagaggaggaggaaggcggctgcgaactgcgcgtgaaattcagccgcagcgcagatgctccagcctacaagcaggggcagaaccagctctacaacgaactcaatcttggtcggagagaggagtacgacgtgctggacaagcggagaggacgggacccagaaatgggcgggaagccgcgcagaaagaatccccaagagggcctgtacaacgagctccaaaaggataagatggcagaagcctatagcgagattggtatgaaaggggaacgcagaagaggcaaaggccacgacggactgtaccagggactcagcaccgccaccaaggacacctatgacgctcttcacatgcaggccctgccgcctcgg

SEQ ID NO: 947 - protein, 491 aa, Artificial Sequence
  source: /note="Description of Artificial Sequence: Synthetic polypeptide"
MALPVTALLLPLALLLHAARPQVQLQESGPGLVKPSETLSLTCTVSGVSLPDYGVSWIRQPPGKGLEWIGVIWGSETTYYNSSLKSRVTISKDNSKNQVSLKLSSVTAADTAVYYCAKHYYYGGSYAMDYWGQGTLVTVSSGGGGSGGGGSGGGGSGGGGSEIVMTQSPATLSLSPGERATLSCRASQDISKYLNWYQQKPGQAPRLLIYHTSRLHSGIPARFSGSGSGTDYTLTISSLQPEDFAVYFCQQGNTLPYTFGQGTKLEIKTTTPAPRPPTPAPTIASQPLSLRPEACRPAAGGAVHTRGLDFACDIYIWAPLAGTCGVLLLSLVITLYCKRGRKKLLYIFKQPFMRPVQTTQEEDGCSCRFPEEEEGGCELRVKFSRSADAPAYKQGQNQLYNELNLGRREEYDVLDKRRGRDPEMGGKPRRKNPQEGLYNELQKDKMAEAYSEIGMKGERRRGKGHDGLYQGLSTATKDTYDALHMQALPPR

SEQ ID NO: 948 - protein, 242 aa, Artificial Sequence
  source: /note="Description of Artificial Sequence: Synthetic polypeptide"
QVQLQESGPGLVKPSETLSLTCTVSGVSLPDYGVSWIRQPPGKGLEWIGVIWGSETTYYNSSLKSRVTISKDNSKNQVSLKLSSVTAADTAVYYCAKHYYYGGSYAMDYWGQGTLVTVSSGGGGSGGGGSGGGGSEIVMTQSPATLSLSPGERATLSCRASQDISKYLNWYQQKPGQAPRLLIYHTSRLHSGIPARFSGSGSGTDYTLTISSLQPEDFAVYFCQQGNTLPYTFGQGTKLEIK

SEQ ID NO: 949 - DNA, 813 bp, Artificial Sequence
  source: /note="Description of Artificial Sequence: Synthetic polynucleotide"
atggctctgcccgtgaccgcactcctcctgccactggctctgctgcttcacgccgctcgcccacaagtccagcttcaagaatcagggcctggtctggtgaagccatctgagactctgtccctcacttgcaccgtgagcggagtgtccctcccagactacggagtgagctggattagacagcctcccggaaagggactggagtggatcggagtgatttggggtagcgaaaccacttactataactcttccctgaagtcacgggtcaccatttcaaaggataactcaaagaatcaagtgagcctcaagctctcatcagtcaccgccgctgacaccgccgtgtattactgtgccaagcattactactatggagggtcctacgccatggactactggggccagggaactctggtcactgtgtcatctggtggaggaggtagcggaggaggcgggagcggtggaggtggctccgaaatcgtgatgacccagagccctgcaaccctgtccctttctcccggggaacgggctaccctttcttgtcgggcatcacaagatatctcaaaatacctcaattggtatcaacagaagccgggacaggcccctaggcttcttatctaccacacctctcgcctgcatagcgggattcccgcacgctttagcgggtctggaagcgggaccgactacactctgaccatctcatctctccagcccgaggacttcgccgtctacttctgccagcagggtaacaccctgccgtacaccttcggccagggcaccaagcttgagatcaaacatcaccaccatcatcaccatcac

SEQ ID NO: 950 - protein, 271 aa, Artificial Sequence
  source: /note="Description of Artificial Sequence: Synthetic polypeptide"
MALPVTALLLPLALLLHAARPQVQLQESGPGLVKPSETLSLTCTVSGVSLPDYGVSWIRQPPGKGLEWIGVIWGSETTYYNSSLKSRVTISKDNSKNQVSLKLSSVTAADTAVYYCAKHYYYGGSYAMDYWGQGTLVTVSSGGGGSGGGGSGGGGSEIVMTQSPATLSLSPGERATLSCRASQDISKYLNWYQQKPGQAPRLLIYHTSRLHSGIPARFSGSGSGTDYTLTISSLQPEDFAVYFCQQGNTLPYTFGQGTKLEIKHHHHHHHH

SEQ ID NO: 951 - DNA, 1458 bp, Artificial Sequence
  source: /note="Description of Artificial Sequence: Synthetic polynucleotide"
atggccctccctgtcaccgccctgctgcttccgctggctcttctgctccacgccgctcggcccgaaattgtgatgacccagtcacccgccactcttagcctttcacccggtgagcgcgcaaccctgtcttgcagagcctcccaagacatctcaaaataccttaattggtatcaacagaagcccggacaggctcctcgccttctgatctaccacaccagccggctccattctggaatccctgccaggttcagcggtagcggatctgggaccgactacaccctcactatcagctcactgcagccagaggacttcgctgtctatttctgtcagcaagggaacaccctgccctacacctttggacagggcaccaagctcgagattaaaggtggaggtggcagcggaggaggtgggtccggcggtggaggaagccaggtccaactccaagaaagcggaccgggtcttgtgaagccatcagaaactctttcactgacttgtactgtgagcggagtgtctctccccgattacggggtgtcttggatcagacagccaccggggaagggtctggaatggattggagtgatttggggctctgagactacttactacaactcatccctcaagtcacgcgtcaccatctcaaaggacaactctaagaatcaggtgtcactgaaactgtcatctgtgaccgcagccgacaccgccgtgtactattgcgctaagcattactattatggcgggagctacgcaatggattactggggacagggtactctggtcaccgtgtccagcaccactaccccagcaccgaggccacccaccccggctcctaccatcgcctcccagcctctgtccctgcgtccggaggcatgtagacccgcagctggtggggccgtgcatacccggggtcttgacttcgcctgcgatatctacatttgggcccctctggctggtacttgcggggtcctgctgctttcactcgtgatcactctttactgtaagcgcggtcggaagaagctgctgtacatctttaagcaacccttcatgaggcctgtgcagactactcaagaggaggacggctgttcatgccggttcccagaggaggaggaaggcggctgcgaactgcgcgtgaaattcagccgcagcgcagatgctccagcctacaagcaggggcagaaccagctctacaacgaactcaatcttggtcggagagaggagtacgacgtgctggacaagcggagaggacgggacccagaaatgggcgggaagccgcgcagaaagaatccccaagagggcctgtacaacgagctccaaaaggataagatggcagaagcctatagcgagattggtatgaaaggggaacgcagaagaggcaaaggccacgacggactgtaccagggactcagcaccgccaccaaggacacctatgacgctcttcacatgcaggccctgccgcctcgg

SEQ ID NO: 952 - protein, 486 aa, Artificial Sequence
  source: /note="Description of Artificial Sequence: Synthetic polypeptide"
MALPVTALLLPLALLLHAARPEIVMTQSPATLSLSPGERATLSCRASQDISKYLNWYQQKPGQAPRLLIYHTSRLHSGIPARFSGSGSGTDYTLTISSLQPEDFAVYFCQQGNTLPYTFGQGTKLEIKGGGGSGGGGSGGGGSQVQLQESGPGLVKPSETLSLTCTVSGVSLPDYGVSWIRQPPGKGLEWIGVIWGSETTYYNSSLKSRVTISKDNSKNQVSLKLSSVTAADTAVYYCAKHYYYGGSYAMDYWGQGTLVTVSSTTTPAPRPPTPAPTIASQPLSLRPEACRPAAGGAVHTRGLDFACDIYIWAPLAGTCGVLLLSLVITLYCKRGRKKLLYIFKQPFMRPVQTTQEEDGCSCRFPEEEEGGCELRVKFSRSADAPAYKQGQNQLYNELNLGRREEYDVLDKRRGRDPEMGGKPRRKNPQEGLYNELQKDKMAEAYSEIGMKGERRRGKGHDGLYQGLSTATKDTYDALHMQALPPR

SEQ ID NO: 953 - DNA, 813 bp, Artificial Sequence
  source: /note="Description of Artificial Sequence: Synthetic polynucleotide"
atggccctgcccgtcaccgctctgctgctgccccttgctctgcttcttcatgcagcaaggccggacatccagatgacccaaaccacctcatccctctctgcctctcttggagacagggtgaccatttcttgtcgcgccagccaggacatcagcaagtatctgaactggtatcagcagaagccggacggaaccgtgaagctcctgatctaccatacctctcgcctgcatagcggcgtgccctcacgcttctctggaagcggatcaggaaccgattattctctcactatttcaaatcttgagcaggaagatattgccacctatttctgccagcagggtaataccctgccctacaccttcggaggagggaccaagctcgaaatcaccggtggaggaggcagcggcggtggagggtctggtggaggtggttctgaggtgaagctgcaagaatcaggccctggacttgtggccccttcacagtccctgagcgtgacttgcaccgtgtccggagtctccctgcccgactacggagtgtcatggatcagacaacctccacggaaaggactggaatggctcggtgtcatctggggtagcgaaactacttactacaattcagccctcaaaagcaggctgactattatcaaggacaacagcaagtcccaagtctttcttaagatgaactcactccagactgacgacaccgcaatctactattgtgctaagcactactactacggaggatcctacgctatggattactggggacaaggtacttccgtcactgtctcttcacaccatcatcaccatcaccatcac

SEQ ID NO: 954 - protein, 271 aa, Artificial Sequence
  source: /note="Description of Artificial Sequence: Synthetic polypeptide"
MALPVTALLLPLALLLHAARPDIQMTQTTSSLSASLGDRVTISCRASQDISKYLNWYQQKPDGTVKLLIYHTSRLHSGVPSRFSGSGSGTDYSLTISNLEQEDIATYFCQQGNTLPYTFGGGTKLEITGGGGSGGGGSGGGGSEVKLQESGPGLVAPSQSLSVTCTVSGVSLPDYGVSWIRQPPRKGLEWLGVIWGSETTYYNSALKSRLTIIKDNSKSQVFLKMNSLQTDDTAIYYCAKHYYYGGSYAMDYWGQGTSVTVSSHHHHHHHH

SEQ ID NO: 955 - DNA, 1458 bp, Artificial Sequence
  source: /note="Description of Artificial Sequence: Synthetic polynucleotide"
atggccttaccagtgaccgccttgctcctgccgctggccttgctgctccacgccgccaggccggacatccagatgacacagactacatcctccctgtctgcctctctgggagacagagtcaccatcagttgcagggcaagtcaggacattagtaaatatttaaattggtatcagcagaaaccagatggaactgttaaactcctgatctaccatacatcaagattacactcaggagtcccatcaaggttcagtggcagtgggtctggaacagattattctctcaccattagcaacctggagcaagaagatattgccacttacttttgccaacagggtaatacgcttccgtacacgttcggaggggggaccaagctggagatcacaggtggcggtggctcgggcggtggtgggtcgggtggcggcggatctgaggtgaaactgcaggagtcaggacctggcctggtggcgccctcacagagcctgtccgtcacatgcactgtctcaggggtctcattacccgactatggtgtaagctggattcgccagcctccacgaaagggtctggagtggctgggagtaatatggggtagtgaaaccacatactataattcagctctcaaatccagactgaccatcatcaaggacaactccaagagccaagttttcttaaaaatgaacagtctgcaaactgatgacacagccatttactactgtgccaaacattattactacggtggtagctatgctatggactactggggccaaggaacctcagtcaccgtctcctcaaccacgacgccagcgccgcgaccaccaacaccggcgcccaccatcgcgtcgcagcccctgtccctgcgcccagaggcgtgccggccagcggcggggggcgcagtgcacacgagggggctggacttcgcctgtgatatctacatctgggcgcccttggccgggacttgtggggtccttctcctgtcactggttatcaccctttactgcaaacggggcagaaagaaactcctgtatatattcaaacaaccatttatgagaccagtacaaactactcaagaggaagatggctgtagctgccgatttccagaagaagaagaaggaggatgtgaactgagagtgaagttcagcaggagcgcagacgcccccgcgtacaagcagggccagaaccagctctataacgagctcaatctaggacgaagagaggagtacgatgttttggacaagagacgtggccgggaccctgagatggggggaaagccgagaaggaagaaccctcaggaaggcctgtacaatgaactgcagaaagataagatggcggaggcctacagtgagattgggatgaaaggcgagcgccggaggggcaaggggcacgatggcctttaccagggtctcagtacagccaccaaggacacctacgacgcccttcacatgcaggccctgccccctcgc

SEQ ID NO: 956 - protein, 486 aa, Artificial Sequence; identical to SEQ ID NO: 891
  source: /note="Description of Artificial Sequence: Synthetic polypeptide"

SEQ ID NO: 957 - protein, 242 aa, Artificial Sequence
  source: /note="Description of Artificial Sequence: Synthetic polypeptide"
DIQMTQTTSSLSASLGDRVTISCRASQDISKYLNWYQQKPDGTVKLLIYHTSRLHSGVPSRFSGSGSGTDYSLTISNLEQEDIATYFCQQGNTLPYTFGGGTKLEITGGGGSGGGGSGGGGSEVKLQESGPGLVAPSQSLSVTCTVSGVSLPDYGVSWIRQPPRKGLEWLGVIWGSETTYYNSALKSRLTIIKDNSKSQVFLKMNSLQTDDTAIYYCAKHYYYGGSYAMDYWGQGTSVTVSS

SEQ ID NO: 958 - protein, 5 aa, Artificial Sequence
  source: /note="Description of Artificial Sequence: Synthetic peptide"
DYGVS

SEQ ID NO: 959 - protein, 16 aa, Artificial Sequence
  source: /note="Description of Artificial Sequence: Synthetic peptide"
VIWGSETTYYNSALKS

SEQ ID NO: 960 - protein, 12 aa, Artificial Sequence
  source: /note="Description of Artificial Sequence: Synthetic peptide"
HYYYGGSYAMDY

SEQ ID NO: 961 - protein, 16 aa, Artificial Sequence
  source: /note="Description of Artificial Sequence: Synthetic peptide"
VIWGSETTYYSSSLKS

SEQ ID NO: 962 - protein, 16 aa, Artificial Sequence
  source: /note="Description of Artificial Sequence: Synthetic peptide"
VIWGSETTYYQSSLKS

SEQ ID NO: 963 - protein, 16 aa, Artificial Sequence
  source: /note="Description of Artificial Sequence: Synthetic peptide"
VIWGSETTYYNSSLKS

SEQ ID NO: 964 - protein, 11 aa, Artificial Sequence
  source: /note="Description of Artificial Sequence: Synthetic peptide"
RASQDISKYLN

SEQ ID NO: 965 - protein, 7 aa, Artificial Sequence
  source: /note="Description of Artificial Sequence: Synthetic peptide"
HTSRLHS

SEQ ID NO: 966 - protein, 9 aa, Artificial Sequence
  source: /note="Description of Artificial Sequence: Synthetic peptide"
QQGNTLPYT

SEQ ID NO: 967 - protein, 239 aa, Artificial Sequence
  source: /note="Description of Artificial Sequence: Synthetic polypeptide"
EVQLVESGGGLVQPGGSLRLSCAVSGFALSNHGMSWVRRAPGKGLEWVSGIVYSGSTYYAASVKGRFTISRDNSRNTLYLQMNSLRPEDTAIYYCSAHGGESDVWGQGTTVTVSSASGGGGSGGRASGGGGSDIQLTQSPSSLSASVGDRVTITCRASQSISSYLNWYQQKPGKAPKLLIYAASSLQSGVPSRFSGSGSGTDFTLTISSLQPEDFATYYCQQSYSTPYTFGQGTKVEIK

SEQ ID NO: 968 - DNA, 717 bp, Artificial Sequence
  source: /note="Description of Artificial Sequence: Synthetic polynucleotide"
gaagtgcaattggtggaatcagggggaggacttgtgcagcctggaggatcgctgagactgtcatgtgccgtgtccggctttgccctgtccaaccacgggatgtcctgggtccgccgcgcgcctggaaagggcctcgaatgggtgtcgggtattgtgtacagcggtagcacctactatgccgcatccgtgaaggggagattcaccatcagccgggacaactccaggaacactctgtacctccaaatgaattcgctgaggccagaggacactgccatctactactgctccgcgcatggcggagagtccgacgtctggggacaggggaccaccgtgaccgtgtctagcgcgtccggcggaggcggcagcgggggtcgggcatcagggggcggcggatcggacatccagctcacccagtccccgagctcgctgtccgcctccgtgggagatcgggtcaccatcacgtgccgcgccagccagtcgatttcctcctacctgaactggtaccaacagaagcccggaaaagccccgaagcttctcatctacgccgcctcgagcctgcagtcaggagtgccctcacggttctccggctccggttccggtactgatttcaccctgaccatttcctccctgcaaccggaggacttcgctacttactactgccagcagtcgtactccaccccctacactttcggacaaggcaccaaggtcgaaatcaag

SEQ ID NO: 969 - protein, 115 aa, Artificial Sequence
  source: /note="Description of Artificial Sequence: Synthetic polypeptide"
EVQLVESGGGLVQPGGSLRLSCAVSGFALSNHGMSWVRRAPGKGLEWVSGIVYSGSTYYAASVKGRFTISRDNSRNTLYLQMNSLRPEDTAIYYCSAHGGESDVWGQGTTVTVSS

SEQ ID NO: 970 - protein, 107 aa, Artificial Sequence
  source: /note="Description of Artificial Sequence: Synthetic polypeptide"
DIQLTQSPSSLSASVGDRVTITCRASQSISSYLNWYQQKPGKAPKLLIYAASSLQSGVPSRFSGSGSGTDFTLTISSLQPEDFATYYCQQSYSTPYTFGQGTKVEIK

SEQ ID NO: 971 - protein, 483 aa, Artificial Sequence
  source: /note="Description of Artificial Sequence: Synthetic polypeptide"
MALPVTALLLPLALLLHAARPEVQLVESGGGLVQPGGSLRLSCAVSGFALSNHGMSWVRRAPGKGLEWVSGIVYSGSTYYAASVKGRFTISRDNSRNTLYLQMNSLRPEDTAIYYCSAHGGESDVWGQGTTVTVSSASGGGGSGGRASGGGGSDIQLTQSPSSLSASVGDRVTITCRASQSISSYLNWYQQKPGKAPKLLIYAASSLQSGVPSRFSGSGSGTDFTLTISSLQPEDFATYYCQQSYSTPYTFGQGTKVEIKTTTPAPRPPTPAPTIASQPLSLRPEACRPAAGGAVHTRGLDFACDIYIWAPLAGTCGVLLLSLVITLYCKRGRKKLLYIFKQPFMRPVQTTQEEDGCSCRFPEEEEGGCELRVKFSRSADAPAYKQGQNQLYNELNLGRREEYDVLDKRRGRDPEMGGKPRRKNPQEGLYNELQKDKMAEAYSEIGMKGERRRGKGHDGLYQGLSTATKDTYDALHMQALPPR

SEQ ID NO: 972 - DNA, 1449 bp, Artificial Sequence
  source: /note="Description of Artificial Sequence: Synthetic polynucleotide"
atggccctccctgtcaccgccctgctgcttccgctggctcttctgctccacgccgctcggcccgaagtgcaattggtggaatcagggggaggacttgtgcagcctggaggatcgctgagactgtcatgtgccgtgtccggctttgccctgtccaaccacgggatgtcctgggtccgccgcgcgcctggaaagggcctcgaatgggtgtcgggtattgtgtacagcggtagcacctactatgccgcatccgtgaaggggagattcaccatcagccgggacaactccaggaacactctgtacctccaaatgaattcgctgaggccagaggacactgccatctactactgctccgcgcatggcggagagtccgacgtctggggacaggggaccaccgtgaccgtgtctagcgcgtccggcggaggcggcagcgggggtcgggcatcagggggcggcggatcggacatccagctcacccagtccccgagctcgctgtccgcctccgtgggagatcgggtcaccatcacgtgccgcgccagccagtcgatttcctcctacctgaactggtaccaacagaagcccggaaaagccccgaagcttctcatctacgccgcctcgagcctgcagtcaggagtgccctcacggttctccggctccggttccggtactgatttcaccctgaccatttcctccctgcaaccggaggacttcgctacttactactgccagcagtcgtactccaccccctacactttcggacaaggcaccaaggtcgaaatcaagaccactaccccagcaccgaggccacccaccccggctcctaccatcgcctcccagcctctgtccctgcgtccggaggcatgtagacccgcagctggtggggccgtgcatacccggggtcttgacttcgcctgcgatatctacatttgggcccctctggctggtacttgcggggtcctgctgctttcactcgtgatcactctttactgtaagcgcggtcggaagaagctgctgtacatctttaagcaacccttcatgaggcctgtgcagactactcaagaggaggacggctgttcatgccggttcccagaggaggaggaaggcggctgcgaactgcgcgtgaaattcagccgcagcgcagatgctccagcctacaagcaggggcagaaccagctctacaacgaactcaatcttggtcggagagaggagtacgacgtgctggacaagcggagaggacgggacccagaaatgggcgggaagccgcgcagaaagaatccccaagagggcctgtacaacgagctccaaaaggataagatggcagaagcctatagcgagattggtatgaaaggggaacgcagaagaggcaaaggccacgacggactgtaccagggactcagcaccgccaccaaggacacctatgacgctcttcacatgcaggccctgccgcctcgg

SEQ ID NO: 973 - protein, 246 aa, Artificial Sequence
  source: /note="Description of Artificial Sequence: Synthetic polypeptide"
QVQLVESGGGLVQPGRSLRLSCAASGFTFSNYAMSWVRQAPGKGLGWVSGISRSGENTYYADSVKGRFTISRDNSKNTLYLQMNSLRDEDTAVYYCARSPAHYYGGMDVWGQGTTVTVSSASGGGGSGGRASGGGGSDIVLTQSPGTLSLSPGERATLSCRASQSISSSFLAWYQQKPGQAPRLLIYGASRRATGIPDRFSGSGSGTDFTLTISRLEPEDSAVYYCQQYHSSPSWTFGQGTKLEIK

SEQ ID NO: 974 - DNA, 738 bp, Artificial Sequence
  source: /note="Description of Artificial Sequence: Synthetic polynucleotide"
caagtgcaactcgtggaatctggtggaggactcgtgcaacccggaagatcgcttagactgtcgtgtgccgccagcgggttcactttctcgaactacgcgatgtcctgggtccgccaggcacccggaaagggactcggttgggtgtccggcatttcccggtccggcgaaaatacctactacgccgactccgtgaagggccgcttcaccatctcaagggacaacagcaaaaacaccctgtacttgcaaatgaactccctgcgggatgaagatacagccgtgtactattgcgcccggtcgcctgcccattactacggcggaatggacgtctggggacagggaaccactgtgactgtcagcagcgcgtcgggtggcggcggctcagggggtcgggcctccggggggggagggtccgacatcgtgctgacccagtccccgggaaccctgagcctgagcccgggagagcgcgcgaccctgtcatgccgggcatcccagagcattagctcctcctttctcgcctggtatcagcagaagcccggacaggccccgaggctgctgatctacggcgctagcagaagggctaccggaatcccagaccggttctccggctccggttccgggaccgatttcacccttactatctcgcgcctggaacctgaggactccgccgtctactactgccagcagtaccactcatccccgtcgtggacgttcggacagggcaccaagctggagattaag

SEQ ID NO: 975 - protein, 120 aa, Artificial Sequence
  source: /note="Description of Artificial Sequence: Synthetic polypeptide"
QVQLVESGGGLVQPGRSLRLSCAASGFTFSNYAMSWVRQAPGKGLGWVSGISRSGENTYYADSVKGRFTISRDNSKNTLYLQMNSLRDEDTAVYYCARSPAHYYGGMDVWGQGTTVTVSS

SEQ ID NO: 976 - protein, 109 aa, Artificial Sequence
  source: /note="Description of Artificial Sequence: Synthetic polypeptide"
DIVLTQSPGTLSLSPGERATLSCRASQSISSSFLAWYQQKPGQAPRLLIYGASRRATGIPDRFSGSGSGTDFTLTISRLEPEDSAVYYCQQYHSSPSWTFGQGTKLEIK

SEQ ID NO: 977 - protein, 490 aa, Artificial Sequence
  source: /note="Description of Artificial Sequence: Synthetic polypeptide"
MALPVTALLLPLALLLHAARPQVQLVESGGGLVQPGRSLRLSCAASGFTFSNYAMSWVRQAPGKGLGWVSGISRSGENTYYADSVKGRFTISRDNSKNTLYLQMNSLRDEDTAVYYCARSPAHYYGGMDVWGQGTTVTVSSASGGGGSGGRASGGGGSDIVLTQSPGTLSLSPGERATLSCRASQSISSSFLAWYQQKPGQAPRLLIYGASRRATGIPDRFSGSGSGTDFTLTISRLEPEDSAVYYCQQYHSSPSWTFGQGTKLEIKTTTPAPRPPTPAPTIASQPLSLRPEACRPAAGGAVHTRGLDFACDIYIWAPLAGTCGVLLLSLVITLYCKRGRKKLLYIFKQPFMRPVQTTQEEDGCSCRFPEEEEGGCELRVKFSRSADAPAYKQGQNQLYNELNLGRREEYDVLDKRRGRDPEMGGKPRRKNPQEGLYNELQKDKMAEAYSEIGMKGERRRGKGHDGLYQGLSTATKDTYDALHMQALPPR

SEQ ID NO: 978 - DNA, 1470 bp, Artificial Sequence
  source: /note="Description of Artificial Sequence: Synthetic polynucleotide"
atggccctccctgtcaccgccctgctgcttccgctggctcttctgctccacgccgctcggccccaagtgcaactcgtggaatctggtggaggactcgtgcaacccggaagatcgcttagactgtcgtgtgccgccagcgggttcactttctcgaactacgcgatgtcctgggtccgccaggcacccggaaagggactcggttgggtgtccggcatttcccggtccggcgaaaatacctactacgccgactccgtgaagggccgcttcaccatctcaagggacaacagcaaaaacaccctgtacttgcaaatgaactccctgcgggatgaagatacagccgtgtactattgcgcccggtcgcctgcccattactacggcggaatggacgtctggggacagggaaccactgtgactgtcagcagcgcgtcgggtggcggcggctcagggggtcgggcctccggggggggagggtccgacatcgtgctgacccagtccccgggaaccctgagcctgagcccgggagagcgcgcgaccctgtcatgccgggcatcccagagcattagctcctcctttctcgcctggtatcagcagaagcccggacaggccccgaggctgctgatctacggcgctagcagaagggctaccggaatcccagaccggttctccggctccggttccgggaccgatttcacccttactatctcgcgcctggaacctgaggactccgccgtctactactgccagcagtaccactcatccccgtcgtggacgttcggacagggcaccaagctggagattaagaccactaccccagcaccgaggccacccaccccggctcctaccatcgcctcccagcctctgtccctgcgtccggaggcatgtagacccgcagctggtggggccgtgcatacccggggtcttgacttcgcctgcgatatctacatttgggcccctctggctggtacttgcggggtcctgctgctttcactcgtgatcactctttactgtaagcgcggtcggaagaagctgctgtacatctttaagcaacccttcatgaggcctgtgcagactactcaagaggaggacggctgttcatgccggttcccagaggaggaggaaggcggctgcgaactgcgcgtgaaattcagccgcagcgcagatgctccagcctacaagcaggggcagaaccagctctacaacgaactcaatcttggtcggagagaggagtacgacgtgctggacaagcggagaggacgggacccagaaatgggcgggaagccgcgcagaaagaatccccaagagggcctgtacaacgagctccaaaaggataagatggcagaagcctatagcgagattggtatgaaaggggaacgcagaagaggcaaaggccacgacggactgtaccagggactcagcaccgccaccaaggacacctatgacgctcttcacatgcaggccctgccgcctcgg

SEQ ID NO: 979 - protein, 244 aa, Artificial Sequence
  source: /note="Description of Artificial Sequence: Synthetic polypeptide"
QVQLVESGGGLVQPGRSLRLSCAASGFTFDDYAMHWVRQAPGKGLEWVSGISWNSGSIGYADSVKGRFTISRDNAKNSLYLQMNSLRAEDTALYYCSVHSFLAYWGQGTLVTVSSASGGGGSGGRASGGGGSDIVMTQTPLSLPVTPGEPASISCRSSQSLLHSNGYNYLDWYLQKPGQSPQLLIYLGSNRASGVPDRFSGSGSGTDFTLKISRVEAEDVGVYYCMQALQTPYTFGQGTKVEIK

SEQ ID NO: 980 - DNA, 732 bp, Artificial Sequence
  source: /note="Description of Artificial Sequence: Synthetic polynucleotide"
caagtgcaactcgtcgaatccggtggaggtctggtccaacctggtagaagcctgagactgtcgtgtgcggccagcggattcacctttgatgactatgctatgcactgggtgcggcaggccccaggaaagggcctggaatgggtgtcgggaattagctggaactccgggtccattggctacgccgactccgtgaagggccgcttcaccatctcccgcgacaacgcaaagaactccctgtacttgcaaatgaactcgctcagggctgaggataccgcgctgtactactgctccgtgcattccttcctggcctactggggacagggaactctggtcaccgtgtcgagcgcctccggcggcgggggctcgggtggacgggcctcgggcggaggggggtccgacatcgtgatgacccagaccccgctgagcttgcccgtgactcccggagagcctgcatccatctcctgccggtcatcccagtcccttctccactccaacggatacaactacctcgactggtacctccagaagccgggacagagccctcagcttctgatctacctggggtcaaatagagcctcaggagtgccggatcggttcagcggatctggttcgggaactgatttcactctgaagatttcccgcgtggaagccgaggacgtgggcgtctactactgtatgcaggcgctgcagaccccctataccttcggccaagggacgaaagtggagatcaag

SEQ ID NO: 981 - protein, 115 aa, Artificial Sequence
  source: /note="Description of Artificial Sequence: Synthetic polypeptide"
QVQLVESGGGLVQPGRSLRLSCAASGFTFDDYAMHWVRQAPGKGLEWVSGISWNSGSIGYADSVKGRFTISRDNAKNSLYLQMNSLRAEDTALYYCSVHSFLAYWGQGTLVTVSS

SEQ ID NO: 982 - protein, 112 aa, Artificial Sequence
  source: /note="Description of Artificial Sequence: Synthetic polypeptide"
DIVMTQTPLSLPVTPGEPASISCRSSQSLLHSNGYNYLDWYLQKPGQSPQLLIYLGSNRASGVPDRFSGSGSGTDFTLKISRVEAEDVGVYYCMQALQTPYTFGQGTKVEIK

SEQ ID NO: 983 - protein, 488 aa, Artificial Sequence
  source: /note="Description of Artificial Sequence: Synthetic polypeptide"
MALPVTALLLPLALLLHAARPQVQLVESGGGLVQPGRSLRLSCAASGFTFDDYAMHWVRQAPGKGLEWVSGISWNSGSIGYADSVKGRFTISRDNAKNSLYLQMNSLRAEDTALYYCSVHSFLAYWGQGTLVTVSSASGGGGSGGRASGGGGSDIVMTQTPLSLPVTPGEPASISCRSSQSLLHSNGYNYLDWYLQKPGQSPQLLIYLGSNRASGVPDRFSGSGSGTDFTLKISRVEAEDVGVYYCMQALQTPYTFGQGTKVEIKTTTPAPRPPTPAPTIASQPLSLRPEACRPAAGGAVHTRGLDFACDIYIWAPLAGTCGVLLLSLVITLYCKRGRKKLLYIFKQPFMRPVQTTQEEDGCSCRFPEEEEGGCELRVKFSRSADAPAYKQGQNQLYNELNLGRREEYDVLDKRRGRDPEMGGKPRRKNPQEGLYNELQKDKMAEAYSEIGMKGERRRGKGHDGLYQGLSTATKDTYDALHMQALPPR

SEQ ID NO: 984 - DNA, 1464 bp, Artificial Sequence
  source: /note="Description of Artificial Sequence: Synthetic polynucleotide"
atggccctccctgtcaccgccctgctgcttccgctggctcttctgctccacgccgctcggccccaagtgcaactcgtcgaatccggtggaggtctggtccaacctggtagaagcctgagactgtcgtgtgcggccagcggattcacctttgatgactatgctatgcactgggtgcggcaggccccaggaaagggcctggaatgggtgtcgggaattagctggaactccgggtccattggctacgccgactccgtgaagggccgcttcaccatctcccgcgacaacgcaaagaactccctgtacttgcaaatgaactcgctcagggctgaggataccgcgctgtactactgctccgtgcattccttcctggcctactggggacagggaactctggtcaccgtgtcgagcgcctccggcggcgggggctcgggtggacgggcctcgggcggaggggggtccgacatcgtgatgacccagaccccgctgagcttgcccgtgactcccggagagcctgcatccatctcctgccggtcatcccagtcccttctccactccaacggatacaactacctcgactggtacctccagaagccgggacagagccctcagcttctgatctacctggggtcaaatagagcctcaggagtgccggatcggttcagcggatctggttcgggaactgatttcactctgaagatttcccgcgtggaagccgaggacgtgggcgtctactactgtatgcaggcgctgcagaccccctataccttcggccaagggacgaaagtggagatcaagaccactaccccagcaccgaggccacccaccccggctcctaccatcgcctcccagcctctgtccctgcgtccggaggcatgtagacccgcagctggtggggccgtgcatacccggggtcttgacttcgcctgcgatatctacatttgggcccctctggctggtacttgcggggtcctgctgctttcactcgtgatcactctttactgtaagcgcggtcggaagaagctgctgtacatctttaagcaacccttcatgaggcctgtgcagactactcaagaggaggacggctgttcatgccggttcccagaggaggaggaaggcggctgcgaactgcgcgtgaaattcagccgcagcgcagatgctccagcctacaagcaggggcagaaccagctctacaacgaactcaatcttggtcggagagaggagtacgacgtgctggacaagcggagaggacgggacccagaaatgggcgggaagccgcgcagaaagaatccccaagagggcctgtacaacgagctccaaaaggataagatggcagaagcctatagcgagattggtatgaaaggggaacgcagaagaggcaaaggccacgacggactgtaccagggactcagcaccgccaccaaggacacctatgacgctcttcacatgcaggccctgccgcctcgg

SEQ ID NO: 985 - protein, 243 aa, Artificial Sequence
  source: /note="Description of Artificial Sequence: Synthetic polypeptide"
EVQLLESGGGLVQPGGSLRLSCAVSGFALSNHGMSWVRRAPGKGLEWVSGIVYSGSTYYAASVKGRFTISRDNSRNTLYLQMNSLRPEDTAIYYCSAHGGESDVWGQGTTVTVSSASGGGGSGGRASGGGGSDIVMTQTPLSLSVTPGQPASISCKSSQSLLRNDGKTPLYWYLQKAGQPPQLLIYEVSNRFSGVPDRFSGSGSGTDFTLKISRVEAEDVGAYYCMQNIQFPSFGGGTKLEIK

SEQ ID NO: 986 - DNA, 729 bp, Artificial Sequence
  source: /note="Description of Artificial Sequence: Synthetic polynucleotide"
gaagtgcaattgttggaatctggaggaggacttgtgcagcctggaggatcactgagactttcgtgtgcggtgtcaggcttcgccctgagcaaccacggcatgagctgggtgcggagagccccggggaagggtctggaatgggtgtccgggatcgtctactccggttcaacttactacgccgcaagcgtgaagggtcgcttcaccatttcccgcgataactcccggaacaccctgtacctccaaatgaactccctgcggcccgaggacaccgccatctactactgttccgcgcatggaggagagtccgatgtctggggacagggcactaccgtgaccgtgtcgagcgcctcggggggaggaggctccggcggtcgcgcctccggggggggtggcagcgacattgtgatgacgcagactccactctcgctgtccgtgaccccgggacagcccgcgtccatctcgtgcaagagctcccagagcctgctgaggaacgacggaaagactcctctgtattggtacctccagaaggctggacagcccccgcaactgctcatctacgaagtgtcaaatcgcttctccggggtgccggatcggttttccggctcgggatcgggcaccgacttcaccctgaaaatctccagggtcgaggccgaggacgtgggagcctactactgcatgcaaaacatccagttcccttccttcggcggcggcacaaagctggagattaag

SEQ ID NO: 987 - protein, 115 aa, Artificial Sequence
  source: /note="Description of Artificial Sequence: Synthetic polypeptide"
EVQLLESGGGLVQPGGSLRLSCAVSGFALSNHGMSWVRRAPGKGLEWVSGIVYSGSTYYAASVKGRFTISRDNSRNTLYLQMNSLRPEDTAIYYCSAHGGESDVWGQGTTVTVSS

SEQ ID NO: 988 - protein, 111 aa, Artificial Sequence
  source: /note="Description of Artificial Sequence: Synthetic polypeptide"
DIVMTQTPLSLSVTPGQPASISCKSSQSLLRNDGKTPLYWYLQKAGQPPQLLIYEVSNRFSGVPDRFSGSGSGTDFTLKISRVEAEDVGAYYCMQNIQFPSFGGGTKLEIK

SEQ ID NO: 989 - protein, 487 aa, Artificial Sequence
  source: /note="Description of Artificial Sequence: Synthetic polypeptide"
MALPVTALLLPLALLLHAARPEVQLLESGGGLVQPGGSLRLSCAVSGFALSNHGMSWVRRAPGKGLEWVSGIVYSGSTYYAASVKGRFTISRDNSRNTLYLQMNSLRPEDTAIYYCSAHGGESDVWGQGTTVTVSSASGGGGSGGRASGGGGSDIVMTQTPLSLSVTPGQPASISCKSSQSLLRNDGKTPLYWYLQKAGQPPQLLIYEVSNRFSGVPDRFSGSGSGTDFTLKISRVEAEDVGAYYCMQNIQFPSFGGGTKLEIKTTTPAPRPPTPAPTIASQPLSLRPEACRPAAGGAVHTRGLDFACDIYIWAPLAGTCGVLLLSLVITLYCKRGRKKLLYIFKQPFMRPVQTTQEEDGCSCRFPEEEEGGCELRVKFSRSADAPAYKQGQNQLYNELNLGRREEYDVLDKRRGRDPEMGGKPRRKNPQEGLYNELQKDKMAEAYSEIGMKGERRRGKGHDGLYQGLSTATKDTYDALHMQALPPR

SEQ ID NO: 990 - DNA, 1461 bp, Artificial Sequence
  source: /note="Description of Artificial Sequence: Synthetic polynucleotide"
atggccctccctgtcaccgccctgctgcttccgctggctcttctgctccacgccgctcggcccgaagtgcaattgttggaatctggaggaggacttgtgcagcctggaggatcactgagactttcgtgtgcggtgtcaggcttcgccctgagcaaccacggcatgagctgggtgcggagagccccggggaagggtctggaatgggtgtccgggatcgtctactccggttcaacttactacgccgcaagcgtgaagggtcgcttcaccatttcccgcgataactcccggaacaccctgtacctccaaatgaactccctgcggcccgaggacaccgccatctactactgttccgcgcatggaggagagtccgatgtctggggacagggcactaccgtgaccgtgtcgagcgcctcggggggaggaggctccggcggtcgcgcctccggggggggtggcagcgacattgtgatgacgcagactccactctcgctgtccgtgaccccgggacagcccgcgtccatctcgtgcaagagctcccagagcctgctgaggaacgacggaaagactcctctgtattggtacctccagaaggctggacagcccccgcaactgctcatctacgaagtgtcaaatcgcttctccggggtgccggatcggttttccggctcgggatcgggcaccgacttcaccctgaaaatctccagggtcgaggccgaggacgtgggagcctactactgcatgcaaaacatccagttcccttccttcggcggcggcacaaagctggagattaagaccactaccccagcaccgaggccacccaccccggctcctaccatcgcctcccagcctctgtccctgcgtccggaggcatgtagacccgcagctggtggggccgtgcatacccggggtcttgacttcgcctgcgatatctacatttgggcccctctggctggtacttgcggggtcctgctgctttcactcgtgatcactctttactgtaagcgcggtcggaagaagctgctgtacatctttaagcaacccttcatgaggcctgtgcagactactcaagaggaggacggctgttcatgccggttcccagaggaggaggaaggcggctgcgaactgcgcgtgaaattcagccgcagcgcagatgctccagcctacaagcaggggcagaaccagctctacaacgaactcaatcttggtcggagagaggagtacgacgtgctggacaagcggagaggacgggacccagaaatgggcgggaagccgcgcagaaagaatccccaagagggcctgtacaacgagctccaaaaggataagatggcagaagcctatagcgagattggtatgaaaggggaacgcagaagaggcaaaggccacgacggactgtaccagggactcagcaccgccaccaaggacacctatgacgctcttcacatgcaggccctgccgcctcgg

SEQ ID NO: 991 - protein, 249 aa, Artificial Sequence
  source: /note="Description of Artificial Sequence: Synthetic polypeptide"
QVQLVQSGAEVRKTGASVKVSCKASGYIFDNFGINWVRQAPGQGLEWMGWINPKNNNTNYAQKFQGRVTITADESTNTAYMEVSSLRSEDTAVYYCARGPYYYQSYMDVWGQGTMVTVSSASGGGGSGGRASGGGGSDIVMTQTPLSLPVTPGEPASISCRSSQSLLHSNGYNYLNWYLQKPGQSPQLLIYLGSKRASGVPDRFSGSGSGTDFTLHITRVGAEDVGVYYCMQALQTPYTFGQGTKLEIK

SEQ ID NO: 992 - DNA, 747 bp, Artificial Sequence
  source: /note="Description of Artificial Sequence: Synthetic polynucleotide"
caagtccaactcgtccagtccggcgcagaagtcagaaaaaccggtgctagcgtgaaagtgtcctgcaaggcctccggctacattttcgataacttcggaatcaactgggtcagacaggccccgggccaggggctggaatggatgggatggatcaaccccaagaacaacaacaccaactacgcacagaagttccagggccgcgtgactatcaccgccgatgaatcgaccaataccgcctacatggaggtgtcctccctgcggtcggaggacactgccgtgtattactgcgcgaggggcccatactactaccaaagctacatggacgtctggggacagggaaccatggtgaccgtgtcatccgcctccggtggtggaggctccggggggcgggcttcaggaggcggaggaagcgatattgtgatgacccagactccgcttagcctgcccgtgactcctggagaaccggcctccatttcctgccggtcctcgcaatcactcctgcattccaacggttacaactacctgaattggtacctccagaagcctggccagtcgccccagttgctgatctatctgggctcgaagcgcgcctccggggtgcctgaccggtttagcggatctgggagcggcacggacttcactctccacatcacccgcgtgggagcggaggacgtgggagtgtactactgtatgcaggcgctgcagactccgtacacattcggacagggcaccaagctggagatcaag

SEQ ID NO: 993 - protein, 120 aa, Artificial Sequence
  source: /note="Description of Artificial Sequence: Synthetic polypeptide"
QVQLVQSGAEVRKTGASVKVSCKASGYIFDNFGINWVRQAPGQGLEWMGWINPKNNNTNYAQKFQGRVTITADESTNTAYMEVSSLRSEDTAVYYCARGPYYYQSYMDVWGQGTMVTVSS

SEQ ID NO: 994 - protein, 112 aa, Artificial Sequence
  source: /note="Description of Artificial Sequence: Synthetic polypeptide"
DIVMTQTPLSLPVTPGEPASISCRSSQSLLHSNGYNYLNWYLQKPGQSPQLLIYLGSKRASGVPDRFSGSGSGTDFTLHITRVGAEDVGVYYCMQALQTPYTFGQGTKLEIK

SEQ ID NO: 995 - protein, 493 aa, Artificial Sequence
  source: /note="Description of Artificial Sequence: Synthetic polypeptide"
MALPVTALLLPLALLLHAARPQVQLVQSGAEVRKTGASVKVSCKASGYIFDNFGINWVRQAPGQGLEWMGWINPKNNNTNYAQKFQGRVTITADESTNTAYMEVSSLRSEDTAVYYCARGPYYYQSYMDVWGQGTMVTVSSASGGGGSGGRASGGGGSDIVMTQTPLSLPVTPGEPASISCRSSQSLLHSNGYNYLNWYLQKPGQSPQLLIYLGSKRASGVPDRFSGSGSGTDFTLHITRVGAEDVGVYYCMQALQTPYTFGQGTKLEIKTTTPAPRPPTPAPTIASQPLSLRPEACRPAAGGAVHTRGLDFACDIYIWAPLAGTCGVLLLSLVITLYCKRGRKKLLYIFKQPFMRPVQTTQEEDGCSCRFPEEEEGGCELRVKFSRSADAPAYKQGQNQLYNELNLGRREEYDVLDKRRGRDPEMGGKPRRKNPQEGLYNELQKDKMAEAYSEIGMKGERRRGKGHDGLYQGLSTATKDTYDALHMQALPPR

SEQ ID NO: 996 - DNA, 1479 bp, Artificial Sequence
  source: /note="Description of Artificial Sequence: Synthetic polynucleotide"
atggccctccctgtcaccgccctgctgcttccgctggctcttctgctccacgccgctcggccccaagtccaactcgtccagtccggcgcagaagtcagaaaaaccggtgctagcgtgaaagtgtcctgcaaggcctccggctacattttcgataacttcggaatcaactgggtcagacaggccccgggccaggggctggaatggatgggatggatcaaccccaagaacaacaacaccaactacgcacagaagttccagggccgcgtgactatcaccgccgatgaatcgaccaataccgcctacatggaggtgtcctccctgcggtcggaggacactgccgtgtattactgcgcgaggggcccatactactaccaaagctacatggacgtctggggacagggaaccatggtgaccgtgtcatccgcctccggtggtggaggctccggggggcgggcttcaggaggcggaggaagcgatattgtgatgacccagactccgcttagcctgcccgtgactcctggagaaccggcctccatttcctgccggtcctcgcaatcactcctgcattccaacggttacaactacctgaattggtacctccagaagcctggccagtcgccccagttgctgatctatctgggctcgaagcgcgcctccggggtgcctgaccggtttagcggatctgggagcggcacggacttcactctccacatcacccgcgtgggagcggaggacgtgggagtgtactactgtatgcaggcgctgcagactccgtacacattcggacagggcaccaagctggagatcaagaccactaccccagcaccgaggccacccaccccggctcctaccatcgcctcccagcctctgtccctgcgtccggaggcatgtagacccgcagctggtggggccgtgcatacccggggtcttgacttcgcctgcgatatctacatttgggcccctctggctggtacttgcggggtcctgctgctttcactcgtgatcactctttactgtaagcgcggtcggaagaagctgctgtacatctttaagcaacccttcatgaggcctgtgcagactactcaagaggaggacggctgttcatgccggttcccagaggaggaggaaggcggctgcgaactgcgcgtgaaattcagccgcagcgcagatgctccagcctacaagcaggggcagaaccagctctacaacgaactcaatcttggtcggagagaggagtacgacgtgctggacaagcggagaggacgggacccagaaatgggcgggaagccgcgcagaaagaatccccaagagggcctgtacaacgagctccaaaaggataagatggcagaagcctatagcgagattggtatgaaaggggaacgcagaagaggcaaaggccacgacggactgtaccagggactcagcaccgccaccaaggacacctatgacgctcttcacatgcaggccctgccgcctcgg

SEQ ID NO: 997 - protein, 246 aa, Artificial Sequence
  source: /note="Description of Artificial Sequence: Synthetic polypeptide"
QVQLQESGGGLVQPGGSLRLSCAASGFTFSSDAMTWVRQAPGKGLEWVSVISGSGGTTYYADSVKGRFTISRDNSKNTLYLQMNSLRAEDTAVYYCAKLDSSGYYYARGPRYWGQGTLVTVSSASGGGGSGGRASGGGGSDIQLTQSPSSLSASVGDRVTITCRASQSISSYLNWYQQKPGKAPKLLIYGASTLASGVPARFSGSGSGTHFTLTINSLQSEDSATYYCQQSYKRASFGQGTKVEIK

SEQ ID NO: 998 - DNA, 738 bp, Artificial Sequence
  source: /note="Description of Artificial Sequence: Synthetic polynucleotide"
caagtgcaacttcaagaatcaggcggaggactcgtgcagcccggaggatcattgcggctctcgtgcgccgcctcgggcttcaccttctcgagcgacgccatgacctgggtccgccaggccccggggaaggggctggaatgggtgtctgtgatttccggctccgggggaactacgtactacgccgattccgtgaaaggtcgcttcactatctcccgggacaacagcaagaacaccctttatctgcaaatgaattccctccgcgccgaggacaccgccgtgtactactgcgccaagctggactcctcgggctactactatgcccggggtccgagatactggggacagggaaccctcgtgaccgtgtcctccgcgtccggcggaggagggtcgggagggcgggcctccggcggcggcggttcggacatccagctgacccagtccccatcctcactgagcgcaagcgtgggcgacagagtcaccattacatgcagggcgtcccagagcatcagctcctacctgaactggtaccaacagaagcctggaaaggctcctaagctgttgatctacggggcttcgaccctggcatccggggtgcccgcgaggtttagcggaagcggtagcggcactcacttcactctgaccattaacagcctccagtccgaggattcagccacttactactgtcagcagtcctacaagcgggccagcttcggacagggcactaaggtcgagatcaag

SEQ ID NO: 999 - protein, 123 aa, Artificial Sequence
  source: /note="Description of Artificial Sequence: Synthetic polypeptide"
QVQLQESGGGLVQPGGSLRLSCAASGFTFSSDAMTWVRQAPGKGLEWVSVISGSGGTTYYADSVKGRFTISRDNSKNTLYLQMNSLRAEDTAVYYCAKLDSSGYYYARGPRYWGQGTLVTVSS

SEQ ID NO: 1000 - protein, 106 aa, Artificial Sequence
  source: /note="Description of Artificial Sequence: Synthetic polypeptide"
DIQLTQSPSSLSASVGDRVTITCRASQSISSYLNWYQQKPGKAPKLLIYGASTLASGVPARFSGSGSGTHFTLTINSLQSEDSATYYCQQSYKRASFGQGTKVEIK

SEQ ID NO: 1001 - protein, 490 aa, Artificial Sequence
  source: /note="Description of Artificial Sequence: Synthetic polypeptide"
MALPVTALLLPLALLLHAARPQVQLQESGGGLVQPGGSLRLSCAASGFTFSSDAMTWVRQAPGKGLEWVSVISGSGGTTYYADSVKGRFTISRDNSKNTLYLQMNSLRAEDTAVYYCAKLDSSGYYYARGPRYWGQGTLVTVSSASGGGGSGGRASGGGGSDIQLTQSPSSLSASVGDRVTITCRASQSISSYLNWYQQKPGKAPKLLIYGASTLASGVPARFSGSGSGTHFTLTINSLQSEDSATYYCQQSYKRASFGQGTKVEIKTTTPAPRPPTPAPTIASQPLSLRPEACRPAAGGAVHTRGLDFACDIYIWAPLAGTCGVLLLSLVITLYCKRGRKKLLYIFKQPFMRPVQTTQEEDGCSCRFPEEEEGGCELRVKFSRSADAPAYKQGQNQLYNELNLGRREEYDVLDKRRGRDPEMGGKPRRKNPQEGLYNELQKDKMAEAYSEIGMKGERRRGKGHDGLYQGLSTATKDTYDALHMQALPPR

SEQ ID NO: 1002 - DNA, 1470 bp, Artificial Sequence
  source: /note="Description of Artificial Sequence: Synthetic polynucleotide"
atggccctccctgtcaccgccctgctgcttccgctggctcttctgctccacgccgctcggccccaagtgcaacttcaagaatcaggcggaggactcgtgcagcccggaggatcattgcggctctcgtgcgccgcctcgggcttcaccttctcgagcgacgccatgacctgggtccgccaggccccggggaaggggctggaatgggtgtctgtgatttccggctccgggggaactacgtactacgccgattccgtgaaaggtcgcttcactatctcccgggacaacagcaagaacaccctttatctgcaaatgaattccctccgcgccgaggacaccgccgtgtactactgcgccaagctggactcctcgggctactactatgcccggggtccgagatactggggacagggaaccctcgtgaccgtgtcctccgcgtccggcggaggagggtcgggagggcgggcctccggcggcggcggttcggacatccagctgacccagtccccatcctcactgagcgcaagcgtgggcgacagagtcaccattacatgcagggcgtcccagagcatcagctcctacctgaactggtaccaacagaagcctggaaaggctcctaagctgttgatctacggggcttcgaccctggcatccggggtgcccgcgaggtttagcggaagcggtagcggcactcacttcactctgaccattaacagcctccagtccgaggattcagccacttactactgtcagcagtcctacaagcgggccagcttcggacagggcactaaggtcgagatcaagaccactaccccagcaccgaggccacccaccccggctcctaccatcgcctcccagcctctgtccctgcgtccggaggcatgtagacccgcagctggtggggccgtgcatacccggggtcttgacttcgcctgcgatatctacatttgggcccctctggctggtacttgcggggtcctgctgctttcactcgtgatcactctttactgtaagcgcggtcggaagaagctgctgtacatctttaagcaacccttcatgaggcctgtgcagactactcaagaggaggacggctgttcatgccggttcccagaggaggaggaaggcggctgcgaactgcgcgtgaaattcagccgcagcgcagatgctccagcctacaagcaggggcagaaccagctctacaacgaactcaatcttggtcggagagaggagtacgacgtgctggacaagcggagaggacgggacccagaaatgggcgggaagccgcgcagaaagaatccccaagagggcctgtacaacgagctccaaaaggataagatggcagaagcctatagcgagattggtatgaaaggggaacgcagaagaggcaaaggccacgacggactgtaccagggactcagcaccgccaccaaggacacctatgacgctcttcacatgcaggccctgccgcctcgg

SEQ ID NO: 1003 - protein, 247 aa, Artificial Sequence
  source: /note="Description of Artificial Sequence: Synthetic polypeptide"
QVQLVQSGAEVKKPGASVKVSCKASGYTFSNYGITWVRQAPGQGLEWMGWISAYNGNTNYAQKFQGRVTMTRNTSISTAYMELSSLRSEDTAVYYCARGPYYYYMDVWGKGTMVTVSSASGGGGSGGRASGGGGSEIVMTQSPLSLPVTPGEPASISCRSSQSLLYSNGYNYVDWYLQKPGQSPQLLIYLGSNRASGVPDRFSGSGSGTDFKLQISRVEAEDVGIYYCMQGRQFPYSFGQGTKVEIK

SEQ ID NO: 1004 - DNA, 741 bp, Artificial Sequence
  source: /note="Description of Artificial Sequence: Synthetic polynucleotide"
caagtccaactggtccagagcggtgcagaagtgaagaagcccggagcgagcgtgaaagtgtcctgcaaggcttccgggtacaccttctccaactacggcatcacttgggtgcgccaggccccgggacagggcctggaatggatggggtggatttccgcgtacaacggcaatacgaactacgctcagaagttccagggtagagtgaccatgactaggaacacctccatttccaccgcctacatggaactgtcctccctgcggagcgaggacaccgccgtgtactattgcgcccggggaccatactactactacatggatgtctgggggaaggggactatggtcaccgtgtcatccgcctcgggaggcggcggatcaggaggacgcgcctctggtggtggaggatcggagatcgtgatgacccagagccctctctccttgcccgtgactcctggggagcccgcatccatttcatgccggagctcccagtcacttctctactccaacggctataactacgtggattggtacctccaaaagccgggccagagcccgcagctgctgatctacctgggctcgaacagggccagcggagtgcctgaccggttctccgggtcgggaagcgggaccgacttcaagctgcaaatctcgagagtggaggccgaggacgtgggaatctactactgtatgcagggccgccagtttccgtactcgttcggacagggcaccaaagtggaaatcaag

SEQ ID NO: 1005 - protein, 118 aa, Artificial Sequence
  source: /note="Description of Artificial Sequence: Synthetic polypeptide"
QVQLVQSGAEVKKPGASVKVSCKASGYTFSNYGITWVRQAPGQGLEWMGWISAYNGNTNYAQKFQGRVTMTRNTSISTAYMELSSLRSEDTAVYYCARGPYYYYMDVWGKGTMVTVSS

SEQ ID NO: 1006 - protein, 112 aa, Artificial Sequence
  source: /note="Description of Artificial Sequence: Synthetic polypeptide"
EIVMTQSPLSLPVTPGEPASISCRSSQSLLYSNGYNYVDWYLQKPGQSPQLLIYLGSNRASGVPDRFSGSGSGTDFKLQISRVEAEDVGIYYCMQGRQFPYSFGQGTKVEIK

SEQ ID NO: 1007 - protein, 491 aa, Artificial Sequence
  source: /note="Description of Artificial Sequence: Synthetic polypeptide"
MALPVTALLLPLALLLHAARPQVQLVQSGAEVKKPGASVKVSCKASGYTFSNYGITWVRQAPGQGLEWMGWISAYNGNTNYAQKFQGRVTMTRNTSISTAYMELSSLRSEDTAVYYCARGPYYYYMDVWGKGTMVTVSSASGGGGSGGRASGGGGSEIVMTQSPLSLPVTPGEPASISCRSSQSLLYSNGYNYVDWYLQKPGQSPQLLIYLGSNRASGVPDRFSGSGSGTDFKLQISRVEAEDVGIYYCMQGRQFPYSFGQGTKVEIKTTTPAPRPPTPAPTIASQPLSLRPEACRPAAGGAVHTRGLDFACDIYIWAPLAGTCGVLLLSLVITLYCKRGRKKLLYIFKQPFMRPVQTTQEEDGCSCRFPEEEEGGCELRVKFSRSADAPAYKQGQNQLYNELNLGRREEYDVLDKRRGRDPEMGGKPRRKNPQEGLYNELQKDKMAEAYSEIGMKGERRRGKGHDGLYQGLSTATKDTYDALHMQALPPR

SEQ ID NO: 1008 - DNA, 1473 bp, Artificial Sequence
  source: /note="Description of Artificial Sequence: Synthetic polynucleotide"
atggccctccctgtcaccgccctgctgcttccgctggctcttctgctccacgccgctcggccccaagtccaactggtccagagcggtgcagaagtgaagaagcccggagcgagcgtgaaagtgtcctgcaaggcttccgggtacaccttctccaactacggcatcacttgggtgcgccaggccccgggacagggcctggaatggatggggtggatttccgcgtacaacggcaatacgaactacgctcagaagttccagggtagagtgaccatgactaggaacacctccatttccaccgcctacatggaactgtcctccctgcggagcgaggacaccgccgtgtactattgcgcccggggaccatactactactacatggatgtctgggggaaggggactatggtcaccgtgtcatccgcctcgggaggcggcggatcaggaggacgcgcctctggtggtggaggatcggagatcgtgatgacccagagccctctctccttgcccgtgactcctggggagcccgcatccatttcatgccggagctcccagtcacttctctactccaacggctataactacgtggattggtacctccaaaagccgggccagagcccgcagctgctgatctacctgggctcgaacagggccagcggagtgcctgaccggttctccgggtcgggaagcgggaccgacttcaagctgcaaatctcgagagtggaggccgaggacgtgggaatctactactgtatgcagggccgccagtttccgtactcgttcggacagggcaccaaagtggaaatcaagaccactaccccagcaccgaggccacccaccccggctcctaccatcgcctcccagcctctgtccctgcgtccggaggcatgtagacccgcagctggtggggccgtgcatacccggggtcttgacttcgcctgcgatatctacatttgggcccctctggctggtacttgcggggtcctgctgctttcactcgtgatcactctttactgtaagcgcggtcggaagaagctgctgtacatctttaagcaacccttcatgaggcctgtgcagactactcaagaggaggacggctgttcatgccggttcccagaggaggaggaaggcggctgcgaactgcgcgtgaaattcagccgcagcgcagatgctccagcctacaagcaggggcagaaccagctctacaacgaactcaatcttggtcggagagaggagtacgacgtgctggacaagcggagaggacgggacccagaaatgggcgggaagccgcgcagaaagaatccccaagagggcctgtacaacgagctccaaaaggataagatggcagaagcctatagcgagattggtatgaaaggggaacgcagaagaggcaaaggccacgacggactgtaccagggactcagcaccgccaccaaggacacctatgacgctcttcacatgcaggccctgccgcctcgg

SEQ ID NO: 1009 - protein, 238 aa, Artificial Sequence
  source: /note="Description of Artificial Sequence: Synthetic polypeptide"
EVQLLETGGGLVQPGGSLRLSCAVSGFALSNHGMSWVRRAPGKGLEWVSGIVYSGSTYYAASVKGRFTISRDNSRNTLYLQMNSLRPEDTAIYYCSAHGGESDVWGQGTTVTVSSASGGGGSGGRASGGGGSEIVLTQSPATLSVSPGESATLSCRASQSVSSNLAWYQQKPGQAPRLLIYGASTRASGIPDRFSGSGSGTDFTLTISSLQAEDVAVYYCQQYGSSLTFGGGTKVEIK

SEQ ID NO: 1010 - DNA, 714 bp, Artificial Sequence
  source: /note="Description of Artificial Sequence: Synthetic polynucleotide"
gaagtgcaattgctcgaaactggaggaggtctggtgcaacctggaggatcacttcgcctgtcctgcgccgtgtcgggctttgccctgtccaaccatggaatgagctgggtccgccgcgcgccggggaagggcctcgaatgggtgtccggcatcgtctactccggctccacctactacgccgcgtccgtgaagggccggttcacgatttcacgggacaactcgcggaacaccctgtacctccaaatgaattcccttcggccggaggatactgccatctactactgctccgcccacggtggcgaatccgacgtctggggccagggaaccaccgtgaccgtgtccagcgcgtccgggggaggaggaagcgggggtagagcatcgggtggaggcggatcagagatcgtgctgacccagtcccccgccaccttgagcgtgtcaccaggagagtccgccaccctgtcatgccgcgccagccagtccgtgtcctccaacctggcttggtaccagcagaagccggggcaggcccctagactcctgatctatggggcgtcgacccgggcatctggaattcccgataggttcagcggatcgggctcgggcactgacttcactctgaccatctcctcgctgcaagccgaggacgtggctgtgtactactgtcagcagtacggaagctccctgactttcggtggcgggaccaaagtcgagattaag

SEQ ID NO: 1011 - protein, 115 aa, Artificial Sequence
  source: /note="Description of Artificial Sequence: Synthetic polypeptide"
EVQLLETGGGLVQPGGSLRLSCAVSGFALSNHGMSWVRRAPGKGLEWVSGIVYSGSTYYAASVKGRFTISRDNSRNTLYLQMNSLRPEDTAIYYCSAHGGESDVWGQGTTVTVSS

SEQ ID NO: 1012 - protein, 106 aa, Artificial Sequence
  source: /note="Description of Artificial Sequence: Synthetic polypeptide"
EIVLTQSPATLSVSPGESATLSCRASQSVSSNLAWYQQKPGQAPRLLIYGASTRASGIPDRFSGSGSGTDFTLTISSLQAEDVAVYYCQQYGSSLTFGGGTKVEIK

SEQ ID NO: 1013 - protein, 482 aa, Artificial Sequence
  source: /note="Description of Artificial Sequence: Synthetic polypeptide"
MALPVTALLLPLALLLHAARPEVQLLETGGGLVQPGGSLRLSCAVSGFALSNHGMSWVRRAPGKGLEWVSGIVYSGSTYYAASVKGRFTISRDNSRNTLYLQMNSLRPEDTAIYYCSAHGGESDVWGQGTTVTVSSASGGGGSGGRASGGGGSEIVLTQSPATLSVSPGESATLSCRASQSVSSNLAWYQQKPGQAPRLLIYGASTRASGIPDRFSGSGSGTDFTLTISSLQAEDVAVYYCQQYGSSLTFGGGTKVEIKTTTPAPRPPTPAPTIASQPLSLRPEACRPAAGGAVHTRGLDFACDIYIWAPLAGTCGVLLLSLVITLYCKRGRKKLLYIFKQPFMRPVQTTQEEDGCSCRFPEEEEGGCELRVKFSRSADAPAYKQGQNQLYNELNLGRREEYDVLDKRRGRDPEMGGKPRRKNPQEGLYNELQKDKMAEAYSEIGMKGERRRGKGHDGLYQGLSTATKDTYDALHMQALPPR

SEQ ID NO: 1014 - DNA, 1446 bp, Artificial Sequence
  source: /note="Description of Artificial Sequence: Synthetic polynucleotide"
atggccctccctgtcaccgccctgctgcttccgctggctcttctgctccacgccgctcggcccgaagtgcaattgctcgaaactggaggaggtctggtgcaacctggaggatcacttcgcctgtcctgcgccgtgtcgggctttgccctgtccaaccatggaatgagctgggtccgccgcgcgccggggaagggcctcgaatgggtgtccggcatcgtctactccggctccacctactacgccgcgtccgtgaagggccggttcacgatttcacgggacaactcgcggaacaccctgtacctccaaatgaattcccttcggccggaggatactgccatctactactgctccgcccacggtggcgaatccgacgtctggggccagggaaccaccgtgaccgtgtccagcgcgtccgggggaggaggaagcgggggtagagcatcgggtggaggcggatcagagatcgtgctgacccagtcccccgccaccttgagcgtgtcaccaggagagtccgccaccctgtcatgccgcgccagccagtccgtgtcctccaacctggcttggtaccagcagaagccggggcaggcccctagactcctgatctatggggcgtcgacccgggcatctggaattcccgataggttcagcggatcgggctcgggcactgacttcactctgaccatctcctcgctgcaagccgaggacgtggctgtgtactactgtcagcagtacggaagctccctgactttcggtggcgggaccaaagtcgagattaagaccactaccccagcaccgaggccacccaccccggctcctaccatcgcctcccagcctctgtccctgcgtccggaggcatgtagacccgcagctggtggggccgtgcatacccggggtcttgacttcgcctgcgatatctacatttgggcccctctggctggtacttgcggggtcctgctgctttcactcgtgatcactctttactgtaagcgcggtcggaagaagctgctgtacatctttaagcaacccttcatgaggcctgtgcagactactcaagaggaggacggctgttcatgccggttcccagaggaggaggaaggcggctgcgaactgcgcgtgaaattcagccgcagcgcagatgctccagcctacaagcaggggcagaaccagctctacaacgaactcaatcttggtcggagagaggagtacgacgtgctggacaagcggagaggacgggacccagaaatgggcgggaagccgcgcagaaagaatccccaagagggcctgtacaacgagctccaaaaggataagatggcagaagcctatagcgagattggtatgaaaggggaacgcagaagaggcaaaggccacgacggactgtaccagggactcagcaccgccaccaaggacacctatgacgctcttcacatgcaggccctgccgcctcgg

SEQ ID NO: 1015 - protein, 239 aa, Artificial Sequence
  source: /note="Description of Artificial Sequence: Synthetic polypeptide"
EVQLVETGGGLVQPGGSLRLSCAVSGFALSNHGMSWVRRAPGKGLEWVSGIVYSGSTYYAASVKGRFTISRDNSRNTLYLQMNSLRPEDTAIYYCSAHGGESDVWGQGTTVTVSSASGGGGSGGRASGGGGSEIVMTQSPATLSVSPGERATLSCRASQSVSSKLAWYQQKPGQAPRLLMYGASIRATGIPDRFSGSGSGTEFTLTISSLEPEDFAVYYCQQYGSSSWTFGQGTKVEIK

SEQ ID NO: 1016 - DNA, 717 bp, Artificial Sequence
  source: /note="Description of Artificial Sequence: Synthetic polynucleotide"
gaagtgcaattggtggaaactggaggaggacttgtgcaacctggaggatcattgagactgagctgcgcagtgtcgggattcgccctgagcaaccatggaatgtcctgggtcagaagggcccctggaaaaggcctcgaatgggtgtcagggatcgtgtactccggttccacttactacgccgcctccgtgaaggggcgcttcactatctcacgggataactcccgcaataccctgtacctccaaatgaacagcctgcggccggaggataccgccatctactactgttccgcccacggtggagagtctgacgtctggggccagggaactaccgtgaccgtgtcctccgcgtccggcggtggagggagcggcggccgcgccagcggcggcggaggctccgagatcgtgatgacccagagccccgctactctgtcggtgtcgcccggagaaagggcgaccctgtcctgccgggcgtcgcagtccgtgagcagcaagctggcttggtaccagcagaagccgggccaggcaccacgcctgcttatgtacggtgcctccattcgggccaccggaatcccggaccggttctcggggtcggggtccggtaccgagttcacactgaccatttcctcgctcgagcccgaggactttgccgtctattactgccagcagtacggctcctcctcatggacgttcggccaggggaccaaggtcgaaatcaag

SEQ ID NO: 1017 - protein, 115 aa, Artificial Sequence
  source: /note="Description of Artificial Sequence: Synthetic polypeptide"
EVQLVETGGGLVQPGGSLRLSCAVSGFALSNHGMSWVRRAPGKGLEWVSGIVYSGSTYYAASVKGRFTISRDNSRNTLYLQMNSLRPEDTAIYYCSAHGGESDVWGQGTTVTVSS

SEQ ID NO: 1018 - protein, 107 aa, Artificial Sequence
  source: /note="Description of Artificial Sequence: Synthetic polypeptide"
EIVMTQSPATLSVSPGERATLSCRASQSVSSKLAWYQQKPGQAPRLLMYGASIRATGIPDRFSGSGSGTEFTLTISSLEPEDFAVYYCQQYGSSSWTFGQGTKVEIK

SEQ ID NO: 1019 - protein, 483 aa, Artificial Sequence
  source: /note="Description of Artificial Sequence: Synthetic polypeptide"
MALPVTALLLPLALLLHAARPEVQLVETGGGLVQPGGSLRLSCAVSGFALSNHGMSWVRRAPGKGLEWVSGIVYSGSTYYAASVKGRFTISRDNSRNTLYLQMNSLRPEDTAIYYCSAHGGESDVWGQGTTVTVSSASGGGGSGGRASGGGGSEIVMTQSPATLSVSPGERATLSCRASQSVSSKLAWYQQKPGQAPRLLMYGASIRATGIPDRFSGSGSGTEFTLTISSLEPEDFAVYYCQQYGSSSWTFGQGTKVEIKTTTPAPRPPTPAPTIASQPLSLRPEACRPAAGGAVHTRGLDFACDIYIWAPLAGTCGVLLLSLVITLYCKRGRKKLLYIFKQPFMRPVQTTQEEDGCSCRFPEEEEGGCELRVKFSRSADAPAYKQGQNQLYNELNLGRREEYDVLDKRRGRDPEMGGKPRRKNPQEGLYNELQKDKMAEAYSEIGMKGERRRGKGHDGLYQGLSTATKDTYDALHMQALPPR

SEQ ID NO: 1020 - DNA, 1449 bp, Artificial Sequence
  source: /note="Description of Artificial Sequence: Synthetic polynucleotide"
atggccctccctgtcaccgccctgctgcttccgctggctcttctgctccacgccgctcggcccgaagtgcaattggtggaaactggaggaggacttgtgcaacctggaggatcattgagactgagctgcgcagtgtcgggattcgccctgagcaaccatggaatgtcctgggtcagaagggcccctggaaaaggcctcgaatgggtgtcagggatcgtgtactccggttccacttactacgccgcctccgtgaaggggcgcttcactatctcacgggataactcccgcaataccctgtacctccaaatgaacagcctgcggccggaggataccgccatctactactgttccgcccacggtggagagtctgacgtctggggccagggaactaccgtgaccgtgtcctccgcgtccggcggtggagggagcggcggccgcgccagcggcggcggaggctccgagatcgtgatgacccagagccccgctactctgtcggtgtcgcccggagaaagggcgaccctgtcctgccgggcgtcgcagtccgtgagcagcaagctggcttggtaccagcagaagccgggccaggcaccacgcctgcttatgtacggtgcctccattcgggccaccggaatcccggaccggttctcggggtcggggtccggtaccgagttcacactgaccatttcctcgctcgagcccgaggactttgccgtctattactgccagcagtacggctcctcctcatggacgttcggccaggggaccaaggtcgaaatcaagaccactaccccagcaccgaggccacccaccccggctcctaccatcgcctcccagcctctgtccctgcgtccggaggcatgtagacccgcagctggtggggccgtgcatacccggggtcttgacttcgcctgcgatatctacatttgggcccctctggctggtacttgcggggtcctgctgctttcactcgtgatcactctttactgtaagcgcggtcggaagaagctgctgtacatctttaagcaacccttcatgaggcctgtgcagactactcaagaggaggacggctgttcatgccggttcccagaggaggaggaaggcggctgcgaactgcgcgtgaaattcagccgcagcgcagatgctccagcctacaagcaggggcagaaccagctctacaacgaactcaatcttggtcggagagaggagtacgacgtgctggacaagcggagaggacgggacccagaaatgggcgggaagccgcgcagaaagaatccccaagagggcctgtacaacgagctccaaaaggataagatggcagaagcctatagcgagattggtatgaaaggggaacgcagaagaggcaaaggccacgacggactgtaccagggactcagcaccgccaccaaggacacctatgacgctcttcacatgcaggccctgccgcctcgg

SEQ ID NO: 1021 - protein, 241 aa, Artificial Sequence
  source: /note="Description of Artificial Sequence: Synthetic polypeptide"
EVQLVETGGGVVQPGGSLRLSCAVSGFALSNHGMSWVRRAPGKGLEWVSGIVYSGSTYYAASVKGRFTISRDNSRNTLYLQMNSLRPEDTAIYYCSAHGGESDVWGQGTTVTVSSASGGGGSGGRASGGGGSEIVLTQSPGTLSLSPGERATLSCRASQSVGSTNLAWYQQKPGQAPRLLIYDASNRATGIPDRFSGGGSGTDFTLTISRLEPEDFAVYYCQQYGSSPPWTFGQGTKVEIK

SEQ ID NO: 1022 - DNA, 723 bp, Artificial Sequence
  source: /note="Description of Artificial Sequence: Synthetic polynucleotide"
gaagtgcaattggtggagactggaggaggagtggtgcaacctggaggaagcctgagactgtcatgcgcggtgtcgggcttcgccctctccaaccacggaatgtcctgggtccgccgggcccctgggaaaggacttgaatgggtgtccggcatcgtgtactcgggttccacctactacgcggcctcagtgaagggccggtttactattagccgcgacaactccagaaacacactgtacctccaaatgaactcgctgcggccggaagataccgctatctactactgctccgcccatgggggagagtcggacgtctggggacagggcaccactgtcactgtgtccagcgcttccggcggtggtggaagcgggggacgggcctcaggaggcggtggcagcgagattgtgctgacccagtcccccgggaccctgagcctgtccccgggagaaagggccaccctctcctgtcgggcatcccagtccgtggggtctactaaccttgcatggtaccagcagaagcccggccaggcccctcgcctgctgatctacgacgcgtccaatagagccaccggcatcccggatcgcttcagcggaggcggatcgggcaccgacttcaccctcaccatttcaaggctggaaccggaggacttcgccgtgtactactgccagcagtatggttcgtccccaccctggacgttcggccaggggactaaggtcgagatcaag

SEQ ID NO: 1023 - protein, 115 aa, Artificial Sequence
  source: /note="Description of Artificial Sequence: Synthetic polypeptide"
EVQLVETGGGVVQPGGSLRLSCAVSGFALSNHGMSWVRRAPGKGLEWVSGIVYSGSTYYAASVKGRFTISRDNSRNTLYLQMNSLRPEDTAIYYCSAHGGESDVWGQGTTVTVSS

SEQ ID NO: 1024 - protein, 109 aa, Artificial Sequence
  source: /note="Description of Artificial Sequence: Synthetic polypeptide"
EIVLTQSPGTLSLSPGERATLSCRASQSVGSTNLAWYQQKPGQAPRLLIYDASNRATGIPDRFSGGGSGTDFTLTISRLEPEDFAVYYCQQYGSSPPWTFGQGTKVEIK

SEQ ID NO: 1025 - protein, 485 aa, Artificial Sequence
  source: /note="Description of Artificial Sequence: Synthetic polypeptide"
MALPVTALLLPLALLLHAARPEVQLVETGGGVVQPGGSLRLSCAVSGFALSNHGMSWVRRAPGKGLEWVSGIVYSGSTYYAASVKGRFTISRDNSRNTLYLQMNSLRPEDTAIYYCSAHGGESDVWGQGTTVTVSSASGGGGSGGRASGGGGSEIVLTQSPGTLSLSPGERATLSCRASQSVGSTNLAWYQQKPGQAPRLLIYDASNRATGIPDRFSGGGSGTDFTLTISRLEPEDFAVYYCQQYGSSPPWTFGQGTKVEIKTTTPAPRPPTPAPTIASQPLSLRPEACRPAAGGAVHTRGLDFACDIYIWAPLAGTCGVLLLSLVITLYCKRGRKKLLYIFKQPFMRPVQTTQEEDGCSCRFPEEEEGGCELRVKFSRSADAPAYKQGQNQLYNELNLGRREEYDVLDKRRGRDPEMGGKPRRKNPQEGLYNELQKDKMAEAYSEIGMKGERRRGKGHDGLYQGLSTATKDTYDALHMQALPPR

SEQ ID NO: 1026 - DNA, 1455 bp, Artificial Sequence
  source: /note="Description of Artificial Sequence: Synthetic polynucleotide"
atggccctccctgtcaccgccctgctgcttccgctggctcttctgctccacgccgctcggcccgaagtgcaattggtggagactggaggaggagtggtgcaacctggaggaagcctgagactgtcatgcgcggtgtcgggcttcgccctctccaaccacggaatgtcctgggtccgccgggcccctgggaaaggacttgaatgggtgtccggcatcgtgtactcgggttccacctactacgcggcctcagtgaagggccggtttactattagccgcgacaactccagaaacacactgtacctccaaatgaactcgctgcggccggaagataccgctatctactactgctccgcccatgggggagagtcggacgtctggggacagggcaccactgtcactgtgtccagcgcttccggcggtggtggaagcgggggacgggcctcaggaggcggtggcagcgagattgtgctgacccagtcccccgggaccctgagcctgtccccgggagaaagggccaccctctcctgtcgggcatcccagtccgtggggtctactaaccttgcatggtaccagcagaagcccggccaggcccctcgcctgctgatctacgacgcgtccaatagagccaccggcatcccggatcgcttcagcggaggcggatcgggcaccgacttcaccctcaccatttcaaggctggaaccggaggacttcgccgtgtactactgccagcagtatggttcgtccccaccctggacgttcggccaggggactaaggtcgagatcaagaccactaccccagcaccgaggccacccaccccggctcctaccatcgcctcccagcctctgtccctgcgtccggaggcatgtagacccgcagctggtggggccgtgcatacccggggtcttgacttcgcctgcgatatctacatttgggcccctctggctggtacttgcggggtcctgctgctttcactcgtgatcactctttactgtaagcgcggtcggaagaagctgctgtacatctttaagcaacccttcatgaggcctgtgcagactactcaagaggaggacggctgttcatgccggttcccagaggaggaggaaggcggctgcgaactgcgcgtgaaattcagccgcagcgcagatgctccagcctacaagcaggggcagaaccagctctacaacgaactcaatcttggtcggagagaggagtacgacgtgctggacaagcggagaggacgggacccagaaatgggcgggaagccgcgcagaaagaatccccaagagggcctgtacaacgagctccaaaaggataagatggcagaagcctatagcgagattggtatgaaaggggaacgcagaagaggcaaaggccacgacggactgtaccagggactcagcaccgccaccaaggacacctatgacgctcttcacatgcaggccctgccgcctcgg

SEQ ID NO: 1027 - protein, 239 aa, Artificial Sequence
  source: /note="Description of Artificial Sequence: Synthetic polypeptide"
QVQLVESGGGLVKPGGSLRLSCAASGFTFSDYYMSWIRQAPGKGLEWVSYISSSGSTIYYADSVKGRFTISRDNAKNSLYLQMNSLRAEDTAVYYCARESGDGMDVWGQGTTVTVSSASGGGGSGGRASGGGGSDIQMTQSPSSLSASVGDRVTITCRASQSISSYLNWYQQKPGKAPKLLIYAASSLQSGVPSRFSGSGSGTDFTLTISSLQPEDFATYYCQQSYTLAFGQGTKVDIK

SEQ ID NO: 1028 - DNA, 717 bp, Artificial Sequence
  source: /note="Description of Artificial Sequence: Synthetic polynucleotide"
caagtgcaactcgtggaatctggtggaggactcgtgaaacctggaggatcattgagactgtcatgcgcggcctcgggattcacgttctccgattactacatgagctggattcgccaggctccggggaagggactggaatgggtgtcctacatttcctcatccggctccaccatctactacgcggactccgtgaaggggagattcaccattagccgcgataacgccaagaacagcctgtaccttcagatgaactccctgcgggctgaagatactgccgtctactactgcgcaagggagagcggagatgggatggacgtctggggacagggtaccactgtgaccgtgtcgtcggcctccggcggagggggttcgggtggaagggccagcggcggcggaggcagcgacatccagatgacccagtccccctcatcgctgtccgcctccgtgggcgaccgcgtcaccatcacatgccgggcctcacagtcgatctcctcctacctcaattggtatcagcagaagcccggaaaggcccctaagcttctgatctacgcagcgtcctccctgcaatccggggtcccatctcggttctccggctcgggcagcggtaccgacttcactctgaccatctcgagcctgcagccggaggacttcgccacttactactgtcagcaaagctacaccctcgcgtttggccagggcaccaaagtggacatcaag

SEQ ID NO: 1029 - protein, 117 aa, Artificial Sequence
  source: /note="Description of Artificial Sequence: Synthetic polypeptide"
QVQLVESGGGLVKPGGSLRLSCAASGFTFSDYYMSWIRQAPGKGLEWVSYISSSGSTIYYADSVKGRFTISRDNAKNSLYLQMNSLRAEDTAVYYCARESGDGMDVWGQGTTVTVSS

SEQ ID NO: 1030 - protein, 105 aa, Artificial Sequence
  source: /note="Description of Artificial Sequence: Synthetic polypeptide"
DIQMTQSPSSLSASVGDRVTITCRASQSISSYLNWYQQKPGKAPKLLIYAASSLQSGVPSRFSGSGSGTDFTLTISSLQPEDFATYYCQQSYTLAFGQGTKVDIK

SEQ ID NO: 1031 - protein, 483 aa, Artificial Sequence
  source: /note="Description of Artificial Sequence: Synthetic polypeptide"
MALPVTALLLPLALLLHAARPQVQLVESGGGLVKPGGSLRLSCAASGFTFSDYYMSWIRQAPGKGLEWVSYISSSGSTIYYADSVKGRFTISRDNAKNSLYLQMNSLRAEDTAVYYCARESGDGMDVWGQGTTVTVSSASGGGGSGGRASGGGGSDIQMTQSPSSLSASVGDRVTITCRASQSISSYLNWYQQKPGKAPKLLIYAASSLQSGVPSRFSGSGSGTDFTLTISSLQPEDFATYYCQQSYTLAFGQGTKVDIKTTTPAPRPPTPAPTIASQPLSLRPEACRPAAGGAVHTRGLDFACDIYIWAPLAGTCGVLLLSLVITLYCKRGRKKLLYIFKQPFMRPVQTTQEEDGCSCRFPEEEEGGCELRVKFSRSADAPAYKQGQNQLYNELNLGRREEYDVLDKRRGRDPEMGGKPRRKNPQEGLYNELQKDKMAEAYSEIGMKGERRRGKGHDGLYQGLSTATKDTYDALHMQALPPR

SEQ ID NO: 1032 - DNA, 1449 bp, Artificial Sequence
  source: /note="Description of Artificial Sequence: Synthetic polynucleotide"
atggccctccctgtcaccgccctgctgcttccgctggctcttctgctccacgccgctcggccccaagtgcaactcgtggaatctggtggaggactcgtgaaacctggaggatcattgagactgtcatgcgcggcctcgggattcacgttctccgattactacatgagctggattcgccaggctccggggaagggactggaatgggtgtcctacatttcctcatccggctccaccatctactacgcggactccgtgaaggggagattcaccattagccgcgataacgccaagaacagcctgtaccttcagatgaactccctgcgggctgaagatactgccgtctactactgcgcaagggagagcggagatgggatggacgtctggggacagggtaccactgtgaccgtgtcgtcggcctccggcggagggggttcgggtggaagggccagcggcggcggaggcagcgacatccagatgacccagtccccctcatcgctgtccgcctccgtgggcgaccgcgtcaccatcacatgccgggcctcacagtcgatctcctcctacctcaattggtatcagcagaagcccggaaaggcccctaagcttctgatctacgcagcgtcctccctgcaatccggggtcccatctcggttctccggctcgggcagcggtaccgacttcactctgaccatctcgagcctgcagccggaggacttcgccacttactactgtcagcaaagctacaccctcgcgtttggccagggcaccaaagtggacatcaagaccactaccccagcaccgaggccacccaccccggctcctaccatcgcctcccagcctctgtccctgcgtccggaggcatgtagacccgcagctggtggggccgtgcatacccggggtcttgacttcgcctgcgatatctacatttgggcccctctggctggtacttgcggggtcctgctgctttcactcgtgatcactctttactgtaagcgcggtcggaagaagctgctgtacatctttaagcaacccttcatgaggcctgtgcagactactcaagaggaggacggctgttcatgccggttcccagaggaggaggaaggcggctgcgaactgcgcgtgaaattcagccgcagcgcagatgctccagcctacaagcaggggcagaaccagctctacaacgaactcaatcttggtcggagagaggagtacgacgtgctggacaagcggagaggacgggacccagaaatgggcgggaagccgcgcagaaagaatccccaagagggcctgtacaacgagctccaaaaggataagatggcagaagcctatagcgagattggtatgaaaggggaacgcagaagaggcaaaggccacgacggactgtaccagggactcagcaccgccaccaaggacacctatgacgctcttcacatgcaggccctgccgcctcgg

SEQ ID NO: 1033 - protein, 246 aa, Artificial Sequence
  source: /note="Description of Artificial Sequence: Synthetic polypeptide"
QVQLVQSGGGLVKPGGSLRLSCAASGFTFSDYYMSWIRQAPGKGLEWVSYISSSGNTIYYADSVKGRFTISRDNAKNSLYLQMNSLRAEDTAVYYCARSTMVREDYWGQGTLVTVSSASGGGGSGGRASGGGGSDIVLTQSPLSLPVTLGQPASISCKSSESLVHNSGKTYLNWFHQRPGQSPRRLIYEVSNRDSGVPDRFTGSGSGTDFTLKISRVEAEDVGVYYCMQGTHWPGTFGQGTKLEIK

SEQ ID NO: 1034 - DNA, 738 bp, Artificial Sequence
  source: /note="Description of Artificial Sequence: Synthetic polynucleotide"
caagtgcaactggtgcaaagcggaggaggattggtcaaacccggaggaagcctgagactgtcatgcgcggcctctggattcaccttctccgattactacatgtcatggatcagacaggccccggggaagggcctcgaatgggtgtcctacatctcgtcctccgggaacaccatctactacgccgacagcgtgaagggccgctttaccatttcccgcgacaacgcaaagaactcgctgtaccttcagatgaattccctgcgggctgaagataccgcggtgtactattgcgcccggtccactatggtccgggaggactactggggacagggcacactcgtgaccgtgtccagcgcgagcgggggtggaggcagcggtggacgcgcctccggcggcggcggttcagacatcgtgctgactcagtcgcccctgtcgctgccggtcaccctgggccaaccggcctcaattagctgcaagtcctcggagagcctggtgcacaactcaggaaagacttacctgaactggttccatcagcggcctggacagtccccacggaggctcatctatgaagtgtccaacagggattcgggggtgcccgaccgcttcactggctccgggtccggcaccgacttcaccttgaaaatctccagagtggaagccgaggacgtgggcgtgtactactgtatgcagggtacccactggcctggaacctttggacaaggaactaagctcgagattaag

SEQ ID NO: 1035 - protein, 117 aa, Artificial Sequence
  source: /note="Description of Artificial Sequence: Synthetic polypeptide"
QVQLVQSGGGLVKPGGSLRLSCAASGFTFSDYYMSWIRQAPGKGLEWVSYISSSGNTIYYADSVKGRFTISRDNAKNSLYLQMNSLRAEDTAVYYCARSTMVREDYWGQGTLVTVSS

SEQ ID NO: 1036 - protein, 112 aa, Artificial Sequence
  source: /note="Description of Artificial Sequence: Synthetic polypeptide"
DIVLTQSPLSLPVTLGQPASISCKSSESLVHNSGKTYLNWFHQRPGQSPRRLIYEVSNRDSGVPDRFTGSGSGTDFTLKISRVEAEDVGVYYCMQGTHWPGTFGQGTKLEIK

SEQ ID NO: 1037 - protein, 490 aa, Artificial Sequence
  source: /note="Description of Artificial Sequence: Synthetic polypeptide"
MALPVTALLLPLALLLHAARPQVQLVQSGGGLVKPGGSLRLSCAASGFTFSDYYMSWIRQAPGKGLEWVSYISSSGNTIYYADSVKGRFTISRDNAKNSLYLQMNSLRAEDTAVYYCARSTMVREDYWGQGTLVTVSSASGGGGSGGRASGGGGSDIVLTQSPLSLPVTLGQPASISCKSSESLVHNSGKTYLNWFHQRPGQSPRRLIYEVSNRDSGVPDRFTGSGSGTDFTLKISRVEAEDVGVYYCMQGTHWPGTFGQGTKLEIKTTTPAPRPPTPAPTIASQPLSLRPEACRPAAGGAVHTRGLDFACDIYIWAPLAGTCGVLLLSLVITLYCKRGRKKLLYIFKQPFMRPVQTTQEEDGCSCRFPEEEEGGCELRVKFSRSADAPAYKQGQNQLYNELNLGRREEYDVLDKRRGRDPEMGGKPRRKNPQEGLYNELQKDKMAEAYSEIGMKGERRRGKGHDGLYQGLSTATKDTYDALHMQALPPR

SEQ ID NO: 1038 - DNA, 1470 bp, Artificial Sequence
  source: /note="Description of Artificial Sequence: Synthetic polynucleotide"
atggccctccctgtcaccgccctgctgcttccgctggctcttctgctccacgccgctcggccccaagtgcaactggtgcaaagcggaggaggattggtcaaacccggaggaagcctgagactgtcatgcgcggcctctggattcaccttctccgattactacatgtcatggatcagacaggccccggggaagggcctcgaatgggtgtcctacatctcgtcctccgggaacaccatctactacgccgacagcgtgaagggccgctttaccatttcccgcgacaacgcaaagaactcgctgtaccttcagatgaattccctgcgggctgaagataccgcggtgtactattgcgcccggtccactatggtccgggaggactactggggacagggcacactcgtgaccgtgtccagcgcgagcgggggtggaggcagcggtggacgcgcctccggcggcggcggttcagacatcgtgctgactcagtcgcccctgtcgctgccggtcaccctgggccaaccggcctcaattagctgcaagtcctcggagagcctggtgcacaactcaggaaagacttacctgaactggttccatcagcggcctggacagtccccacggaggctcatctatgaagtgtccaacagggattcgggggtgcccgaccgcttcactggctccgggtccggcaccgacttcaccttgaaaatctccagagtggaagccgaggacgtgggcgtgtactactgtatgcagggtacccactggcctggaacctttggacaaggaactaagctcgagattaagaccactaccccagcaccgaggccacccaccccggctcctaccatcgcctcccagcctctgtccctgcgtccggaggcatgtagacccgcagctggtggggccgtgcatacccggggtcttgacttcgcctgcgatatctacatttgggcccctctggctggtacttgcggggtcctgctgctttcactcgtgatcactctttactgtaagcgcggtcggaagaagctgctgtacatctttaagcaacccttcatgaggcctgtgcagactactcaagaggaggacggctgttcatgccggttcccagaggaggaggaaggcggctgcgaactgcgcgtgaaattcagccgcagcgcagatgctccagcctacaagcaggggcagaaccagctctacaacgaactcaatcttggtcggagagaggagtacgacgtgctggacaagcggagaggacgggacccagaaatgggcgggaagccgcgcagaaagaatccccaagagggcctgtacaacgagctccaaaaggataagatggcagaagcctatagcgagattggtatgaaaggggaacgcagaagaggcaaaggccacgacggactgtaccagggactcagcaccgccaccaaggacacctatgacgctcttcacatgcaggccctgccgcctcgg

SEQ ID NO: 1039 - protein, 239 aa, Artificial Sequence
  source: /note="Description of Artificial Sequence: Synthetic polypeptide"
QVQLVESGGGLVQPGGSLRLSCAVSGFALSNHGMSWVRRAPGKGLEWVSGIVYSGSTYYAASVKGRFTISRDNSRNTLYLQMNSLRPEDTAIYYCSAHGGESDVWGQGTTVTVSSASGGGGSGGRASGGGGSDIRLTQSPSPLSASVGDRVTITCQASEDINKFLNWYHQTPGKAPKLLIYDASTLQTGVPSRFSGSGSGTDFTLTINSLQPEDIGTYYCQQYESLPLTFGGGTKVEIK

SEQ ID NO: 1040 - DNA, 717 bp, Artificial Sequence
  source: /note="Description of Artificial Sequence: Synthetic polynucleotide"
caagtgcaactcgtggaatctggtggaggactcgtgcaacccggtggaagccttaggctgtcgtgcgccgtcagcgggtttgctctgagcaaccatggaatgtcctgggtccgccgggcaccgggaaaagggctggaatgggtgtccggcatcgtgtacagcgggtcaacctattacgccgcgtccgtgaagggcagattcactatctcaagagacaacagccggaacaccctgtacttgcaaatgaattccctgcgccccgaggacaccgccatctactactgctccgcccacggaggagagtcggacgtgtggggccagggaacgactgtgactgtgtccagcgcatcaggagggggtggttcgggcggccgggcctcggggggaggaggttccgacattcggctgacccagtccccgtccccactgtcggcctccgtcggcgaccgcgtgaccatcacttgtcaggcgtccgaggacattaacaagttcctgaactggtaccaccagacccctggaaaggcccccaagctgctgatctacgatgcctcgacccttcaaactggagtgcctagccggttctccgggtccggctccggcactgatttcactctgaccatcaactcattgcagccggaagatatcgggacctactattgccagcagtacgaatccctcccgctcacattcggcgggggaaccaaggtcgagattaag

SEQ ID NO: 1041 - protein, 115 aa, Artificial Sequence
  source: /note="Description of Artificial Sequence: Synthetic polypeptide"
QVQLVESGGGLVQPGGSLRLSCAVSGFALSNHGMSWVRRAPGKGLEWVSGIVYSGSTYYAASVKGRFTISRDNSRNTLYLQMNSLRPEDTAIYYCSAHGGESDVWGQGTTVTVSS

SEQ ID NO: 1042 - protein, 107 aa, Artificial Sequence
  source: /note="Description of Artificial Sequence: Synthetic polypeptide"
DIRLTQSPSPLSASVGDRVTITCQASEDINKFLNWYHQTPGKAPKLLIYDASTLQTGVPSRFSGSGSGTDFTLTINSLQPEDIGTYYCQQYESLPLTFGGGTKVEIK

SEQ ID NO: 1043 - protein, 483 aa, Artificial Sequence
  source: /note="Description of Artificial Sequence: Synthetic polypeptide"
MALPVTALLLPLALLLHAARPQVQLVESGGGLVQPGGSLRLSCAVSGFALSNHGMSWVRRAPGKGLEWVSGIVYSGSTYYAASVKGRFTISRDNSRNTLYLQMNSLRPEDTAIYYCSAHGGESDVWGQGTTVTVSSASGGGGSGGRASGGGGSDIRLTQSPSPLSASVGDRVTITCQASEDINKFLNWYHQTPGKAPKLLIYDASTLQTGVPSRFSGSGSGTDFTLTINSLQPEDIGTYYCQQYESLPLTFGGGTKVEIKTTTPAPRPPTPAPTIASQPLSLRPEACRPAAGGAVHTRGLDFACDIYIWAPLAGTCGVLLLSLVITLYCKRGRKKLLYIFKQPFMRPVQTTQEEDGCSCRFPEEEEGGCELRVKFSRSADAPAYKQGQNQLYNELNLGRREEYDVLDKRRGRDPEMGGKPRRKNPQEGLYNELQKDKMAEAYSEIGMKGERRRGKGHDGLYQGLSTATKDTYDALHMQALPPR

SEQ ID NO: 1044 - DNA, 1449 bp, Artificial Sequence
  source: /note="Description of Artificial Sequence: Synthetic polynucleotide"
atggccctccctgtcaccgccctgctgcttccgctggctcttctgctccacgccgctcggccccaagtgcaactcgtggaatctggtggaggactcgtgcaacccggtggaagccttaggctgtcgtgcgccgtcagcgggtttgctctgagcaaccatggaatgtcctgggtccgccgggcaccgggaaaagggctggaatgggtgtccggcatcgtgtacagcgggtcaacctattacgccgcgtccgtgaagggcagattcactatctcaagagacaacagccggaacaccctgtacttgcaaatgaattccctgcgccccgaggacaccgccatctactactgctccgcccacggaggagagtcggacgtgtggggccagggaacgactgtgactgtgtccagcgcatcaggagggggtggttcgggcggccgggcctcggggggaggaggttccgacattcggctgacccagtccccgtccccactgtcggcctccgtcggcgaccgcgtgaccatcacttgtcaggcgtccgaggacattaacaagttcctgaactggtaccaccagacccctggaaaggcccccaagctgctgatctacgatgcctcgacccttcaaactggagtgcctagccggttctccgggtccggctccggcactgatttcactctgaccatcaactcattgcagccggaagatatcgggacctactattgccagcagtacgaatccctcccgctcacattcggcgggggaaccaaggtcgagattaagaccactaccccagcaccgaggccacccaccccggctcctaccatcgcctcccagcctctgtccctgcgtccggaggcatgtagacccgcagctggtggggccgtgcatacccggggtcttgacttcgcctgcgatatctacatttgggcccctctggctggtacttgcggggtcctgctgctttcactcgtgatcactctttactgtaagcgcggtcggaagaagctgctgtacatctttaagcaacccttcatgaggcctgtgcagactactcaagaggaggacggctgttcatgccggttcccagaggaggaggaaggcggctgcgaactgcgcgtgaaattcagccgcagcgcagatgctccagcctacaagcaggggcagaaccagctctacaacgaactcaatcttggtcggagagaggagtacgacgtgctggacaagcggagaggacgggacccagaaatgggcgggaagccgcgcagaaagaatccccaagagggcctgtacaacgagctccaaaaggataagatggcagaagcctatagcgagattggtatgaaaggggaacgcagaagaggcaaaggccacgacggactgtaccagggactcagcaccgccaccaaggacacctatgacgctcttcacatgcaggccctgccgcctcgg

SEQ ID NO: 1045 - protein, 240 aa, Artificial Sequence
  source: /note="Description of Artificial Sequence: Synthetic polypeptide"
EVQLVETGGGLVQPGGSLRLSCAVSGFALSNHGMSWVRRAPGKGLEWVSGIVYSGSTYYAASVKGRFTISRDNSRNTLYLQMNSLRPEDTAIYYCSAHGGESDVWGQGTTVTVSSASGGGGSGGRASGGGGSETTLTQSPATLSVSPGERATLSCRASQSVGSNLAWYQQKPGQGPRLLIYGASTRATGIPARFSGSGSGTEFTLTISSLQPEDFAVYYCQQYNDWLPVTFGQGTKVEIK

SEQ ID NO: 1046 - DNA, 720 bp, Artificial Sequence
  source: /note="Description of Artificial Sequence: Synthetic polynucleotide"
gaagtgcaattggtggaaactggaggaggacttgtgcaacctggaggatcattgcggctctcatgcgctgtctccggcttcgccctgtcaaatcacgggatgtcgtgggtcagacgggccccgggaaagggtctggaatgggtgtcggggattgtgtacagcggctccacctactacgccgcttcggtcaagggccgcttcactatttcacgggacaacagccgcaacaccctctatctgcaaatgaactctctccgcccggaggataccgccatctactactgctccgcacacggcggcgaatccgacgtgtggggacagggaaccactgtcaccgtgtcgtccgcatccggtggcggaggatcgggtggccgggcctccgggggcggcggcagcgagactaccctgacccagtcccctgccactctgtccgtgagcccgggagagagagccacccttagctgccgggccagccagagcgtgggctccaacctggcctggtaccagcagaagccaggacagggtcccaggctgctgatctacggagcctccactcgcgcgaccggcatccccgcgaggttctccgggtcgggttccgggaccgagttcaccctgaccatctcctccctccaaccggaggacttcgcggtgtactactgtcagcagtacaacgattggctgcccgtgacatttggacaggggacgaaggtggaaatcaaa

SEQ ID NO: 1047 - protein, 115 aa, Artificial Sequence; identical to SEQ ID NO: 1017
  source: /note="Description of Artificial Sequence: Synthetic polypeptide"

SEQ ID NO: 1048 - protein, 108 aa, Artificial Sequence
  source: /note="Description of Artificial Sequence: Synthetic polypeptide"
ETTLTQSPATLSVSPGERATLSCRASQSVGSNLAWYQQKPGQGPRLLIYGASTRATGIPARFSGSGSGTEFTLTISSLQPEDFAVYYCQQYNDWLPVTFGQGTKVEIK

SEQ ID NO: 1049 - protein, 484 aa, Artificial Sequence
  source: /note="Description of Artificial Sequence: Synthetic polypeptide"
MALPVTALLLPLALLLHAARPEVQLVETGGGLVQPGGSLRLSCAVSGFALSNHGMSWVRRAPGKGLEWVSGIVYSGSTYYAASVKGRFTISRDNSRNTLYLQMNSLRPEDTAIYYCSAHGGESDVWGQGTTVTVSSASGGGGSGGRASGGGGSETTLTQSPATLSVSPGERATLSCRASQSVGSNLAWYQQKPGQGPRLLIYGASTRATGIPARFSGSGSGTEFTLTISSLQPEDFAVYYCQQYNDWLPVTFGQGTKVEIKTTTPAPRPPTPAPTIASQPLSLRPEACRPAAGGAVHTRGLDFACDIYIWAPLAGTCGVLLLSLVITLYCKRGRKKLLYIFKQPFMRPVQTTQEEDGCSCRFPEEEEGGCELRVKFSRSADAPAYKQGQNQLYNELNLGRREEYDVLDKRRGRDPEMGGKPRRKNPQEGLYNELQKDKMAEAYSEIGMKGERRRGKGHDGLYQGLSTATKDTYDALHMQALPPR

SEQ ID NO: 1050 - DNA, 1452 bp, Artificial Sequence
  source: /note="Description of Artificial Sequence: Synthetic polynucleotide"
atggccctccctgtcaccgccctgctgcttccgctggctcttctgctccacgccgctcggcccgaagtgcaattggtggaaactggaggaggacttgtgcaacctggaggatcattgcggctctcatgcgctgtctccggcttcgccctgtcaaatcacgggatgtcgtgggtcagacgggccccgggaaagggtctggaatgggtgtcggggattgtgtacagcggctccacctactacgccgcttcggtcaagggccgcttcactatttcacgggacaacagccgcaacaccctctatctgcaaatgaactctctccgcccggaggataccgccatctactactgctccgcacacggcggcgaatccgacgtgtggggacagggaaccactgtcaccgtgtcgtccgcatccggtggcggaggatcgggtggccgggcctccgggggcggcggcagcgagactaccctgacccagtcccctgccactctgtccgtgagcccgggagagagagccacccttagctgccgggccagccagagcgtgggctccaacctggcctggtaccagcagaagccaggacagggtcccaggctgctgatctacggagcctccactcgcgcgaccggcatccccgcgaggttctccgggtcgggttccgggaccgagttcaccctgaccatctcctccctccaaccggaggacttcgcggtgtactactgtcagcagtacaacgattggctgcccgtgacatttggacaggggacgaaggtggaaatcaaaaccactaccccagcaccgaggccacccaccccggctcctaccatcgcctcccagcctctgtccctgcgtccggaggcatgtagacccgcagctggtggggccgtgcatacccggggtcttgacttcgcctgcgatatctacatttgggcccctctggctggtacttgcggggtcctgctgctttcactcgtgatcactctttactgtaagcgcggtcggaagaagctgctgtacatctttaagcaacccttcatgaggcctgtgcagactactcaagaggaggacggctgttcatgccggttcccagaggaggaggaaggcggctgcgaactgcgcgtgaaattcagccgcagcgcagatgctccagcctacaagcaggggcagaaccagctctacaacgaactcaatcttggtcggagagaggagtacgacgtgctggacaagcggagaggacgggacccagaaatgggcgggaagccgcgcagaaagaatccccaagagggcctgtacaacgagctccaaaaggataagatggcagaagcctatagcgagattggtatgaaaggggaacgcagaagaggcaaaggccacgacggactgtaccagggactcagcaccgccaccaaggacacctatgacgctcttcacatgcaggccctgccgcctcgg

SEQ ID NO: 1051 - protein, 241 aa, Artificial Sequence
  source: /note="Description of Artificial Sequence: Synthetic polypeptide"
EVQLVESGGGLVQPGGSLRLSCAVSGFALSNHGMSWVRRAPGKGLEWVSGIVYSGSTYYAASVKGRFTISRDNSRNTLYLQMNSLRPEDTAIYYCSAHGGESDVWGQGTTVTVSSASGGGGSGGRASGGGGSEIVLTQSPGTLSLSPGERATLSCRASQSIGSSSLAWYQQKPGQAPRLLMYGASSRASGIPDRFSGSGSGTDFTLTISRLEPEDFAVYYCQQYAGSPPFTFGQGTKVEIK

SEQ ID NO: 1052 - DNA, 723 bp, Artificial Sequence
  source: /note="Description of Artificial Sequence: Synthetic polynucleotide"
gaagtgcaattggtggaatctggtggaggacttgtgcaacctggaggatcactgagactgtcatgcgcggtgtccggttttgccctgagcaatcatgggatgtcgtgggtccggcgcgcccccggaaagggtctggaatgggtgtcgggtatcgtctactccgggagcacttactacgccgcgagcgtgaagggccgcttcaccatttcccgcgataactcccgcaacaccctgtacttgcaaatgaactcgctccggcctgaggacactgccatctactactgctccgcacacggaggagaatccgacgtgtggggccagggaactaccgtgaccgtcagcagcgcctccggcggcgggggctcaggcggacgggctagcggcggcggtggctccgagatcgtgctgacccagtcgcctggcactctctcgctgagccccggggaaagggcaaccctgtcctgtcgggccagccagtccattggatcatcctccctcgcctggtatcagcagaaaccgggacaggctccgcggctgcttatgtatggggccagctcaagagcctccggcattcccgaccggttctccgggtccggttccggcaccgatttcaccctgactatctcgaggctggagccagaggacttcgccgtgtactactgccagcagtacgcggggtccccgccgttcacgttcggacagggaaccaaggtcgagatcaag

SEQ ID NO: 1053 - protein, 115 aa, Artificial Sequence; identical to SEQ ID NO: 969
  source: /note="Description of Artificial Sequence: Synthetic polypeptide"

SEQ ID NO: 1054 - protein, 109 aa, Artificial Sequence
  source: /note="Description of Artificial Sequence: Synthetic polypeptide"
EIVLTQSPGTLSLSPGERATLSCRASQSIGSSSLAWYQQKPGQAPRLLMYGASSRASGIPDRFSGSGSGTDFTLTISRLEPEDFAVYYCQQYAGSPPFTFGQGTKVEIK

SEQ ID NO: 1055 - protein, 485 aa, Artificial Sequence
  source: /note="Description of Artificial Sequence: Synthetic polypeptide"
MALPVTALLLPLALLLHAARPEVQLVESGGGLVQPGGSLRLSCAVSGFALSNHGMSWVRRAPGKGLEWVSGIVYSGSTYYAASVKGRFTISRDNSRNTLYLQMNSLRPEDTAIYYCSAHGGESDVWGQGTTVTVSSASGGGGSGGRASGGGGSEIVLTQSPGTLSLSPGERATLSCRASQSIGSSSLAWYQQKPGQAPRLLMYGASSRASGIPDRFSGSGSGTDFTLTISRLEPEDFAVYYCQQYAGSPPFTFGQGTKVEIKTTTPAPRPPTPAPTIASQPLSLRPEACRPAAGGAVHTRGLDFACDIYIWAPLAGTCGVLLLSLVITLYCKRGRKKLLYIFKQPFMRPVQTTQEEDGCSCRFPEEEEGGCELRVKFSRSADAPAYKQGQNQLYNELNLGRREEYDVLDKRRGRDPEMGGKPRRKNPQEGLYNELQKDKMAEAYSEIGMKGERRRGKGHDGLYQGLSTATKDTYDALHMQALPPR

SEQ ID NO: 1056 - DNA, 1455 bp, Artificial Sequence
  source: /note="Description of Artificial Sequence: Synthetic polynucleotide"
atggccctccctgtcaccgccctgctgcttccgctggctcttctgctccacgccgctcggcccgaagtgcaattggtggaatctggtggaggacttgtgcaacctggaggatcactgagactgtcatgcgcggtgtccggttttgccctgagcaatcatgggatgtcgtgggtccggcgcgcccccggaaagggtctggaatgggtgtcgggtatcgtctactccgggagcacttactacgccgcgagcgtgaagggccgcttcaccatttcccgcgataactcccgcaacaccctgtacttgcaaatgaactcgctccggcctgaggacactgccatctactactgctccgcacacggaggagaatccgacgtgtggggccagggaactaccgtgaccgtcagcagcgcctccggcggcgggggctcaggcggacgggctagcggcggcggtggctccgagatcgtgctgacccagtcgcctggcactctctcgctgagccccggggaaagggcaaccctgtcctgtcgggccagccagtccattggatcatcctccctcgcctggtatcagcagaaaccgggacaggctccgcggctgcttatgtatggggccagctcaagagcctccggcattcccgaccggttctccgggtccggttccggcaccgatttcaccctgactatctcgaggctggagccagaggacttcgccgtgtactactgccagcagtacgcggggtccccgccgttcacgttcggacagggaaccaaggtcgagatcaagaccactaccccagcaccgaggccacccaccccggctcctaccatcgcctcccagcctctgtccctgcgtccggaggcatgtagacccgcagctggtggggccgtgcatacccggggtcttgacttcgcctgcgatatctacatttgggcccctctggctggtacttgcggggtcctgctgctttcactcgtgatcactctttactgtaagcgcggtcggaagaagctgctgtacatctttaagcaacccttcatgaggcctgtgcagactactcaagaggaggacggctgttcatgccggttcccagaggaggaggaaggcggctgcgaactgcgcgtgaaattcagccgcagcgcagatgctccagcctacaagcaggggcagaaccagctctacaacgaactcaatcttggtcggagagaggagtacgacgtgctggacaagcggagaggacgggacccagaaatgggcgggaagccgcgcagaaagaatccccaagagggcctgtacaacgagctccaaaaggataagatggcagaagcctatagcgagattggtatgaaaggggaacgcagaagaggcaaaggccacgacggactgtaccagggactcagcaccgccaccaaggacacctatgacgctcttcacatgcaggccctgccgcctcgg

SEQ ID NO: 1057 - protein, 243 aa, Artificial Sequence
  source: /note="Description of Artificial Sequence: Synthetic polypeptide"
QVQLQESGPGLVKPSETLSLTCTVSGGSISSSYYYWGWIRQPPGKGLEWIGSIYYSGSAYYNPSLKSRVTISVDTSKNQFSLRLSSVTAADTAVYYCARHWQEWPDAFDIWGQGTMVTVSSGGGGSGGGGSGGGGSETTLTQSPAFMSATPGDKVIISCKASQDIDDAMNWYQQKPGEAPLFIIQSATSPVPGIPPRFSGSGFGTDFSLTINNIESEDAAYYFCLQHDNFPLTFGQGTKLEIK

SEQ ID NO: 1058 - DNA, 729 bp, Artificial Sequence
  source: /note="Description of Artificial Sequence: Synthetic polynucleotide"
caagtgcagcttcaggaaagcggaccgggcctggtcaagccatccgaaactctctccctgacttgcactgtgtctggcggttccatctcatcgtcgtactactactggggctggattaggcagccgcccggaaagggactggagtggatcggaagcatctactattccggctcggcgtactacaaccctagcctcaagtcgagagtgaccatctccgtggatacctccaagaaccagttttccctgcgcctgagctccgtgaccgccgctgacaccgccgtgtactactgtgctcggcattggcaggaatggcccgatgccttcgacatttggggccagggcactatggtcactgtgtcatccgggggtggaggcagcgggggaggagggtccggggggggaggttcagagacaaccttgacccagtcacccgcattcatgtccgccactccgggagacaaggtcatcatctcgtgcaaagcgtcccaggatatcgacgatgccatgaattggtaccagcagaagcctggcgaagcgccgctgttcattatccaatccgcaacctcgcccgtgcctggaatcccaccgcggttcagcggcagcggtttcggaaccgacttttccctgaccattaacaacattgagtccgaggacgccgcctactacttctgcctgcaacacgacaacttccctctcacgttcggccagggaaccaagctggaaatcaag

SEQ ID NO: 1059 - protein, 121 aa, Artificial Sequence
  source: /note="Description of Artificial Sequence: Synthetic polypeptide"
QVQLQESGPGLVKPSETLSLTCTVSGGSISSSYYYWGWIRQPPGKGLEWIGSIYYSGSAYYNPSLKSRVTISVDTSKNQFSLRLSSVTAADTAVYYCARHWQEWPDAFDIWGQGTMVTVSS

SEQ ID NO: 1060 - protein, 107 aa, Artificial Sequence
  source: /note="Description of Artificial Sequence: Synthetic polypeptide"
ETTLTQSPAFMSATPGDKVIISCKASQDIDDAMNWYQQKPGEAPLFIIQSATSPVPGIPPRFSGSGFGTDFSLTINNIESEDAAYYFCLQHDNFPLTFGQGTKLEIK

SEQ ID NO: 1061 - protein, 487 aa, Artificial Sequence
  source: /note="Description of Artificial Sequence: Synthetic polypeptide"
MALPVTALLLPLALLLHAARPQVQLQESGPGLVKPSETLSLTCTVSGGSISSSYYYWGWIRQPPGKGLEWIGSIYYSGSAYYNPSLKSRVTISVDTSKNQFSLRLSSVTAADTAVYYCARHWQEWPDAFDIWGQGTMVTVSSGGGGSGGGGSGGGGSETTLTQSPAFMSATPGDKVIISCKASQDIDDAMNWYQQKPGEAPLFIIQSATSPVPGIPPRFSGSGFGTDFSLTINNIESEDAAYYFCLQHDNFPLTFGQGTKLEIKTTTPAPRPPTPAPTIASQPLSLRPEACRPAAGGAVHTRGLDFACDIYIWAPLAGTCGVLLLSLVITLYCKRGRKKLLYIFKQPFMRPVQTTQEEDGCSCRFPEEEEGGCELRVKFSRSADAPAYKQGQNQLYNELNLGRREEYDVLDKRRGRDPEMGGKPRRKNPQEGLYNELQKDKMAEAYSEIGMKGERRRGKGHDGLYQGLSTATKDTYDALHMQALPPR

SEQ ID NO: 1062 - DNA, 1461 bp, Artificial Sequence
  source: /note="Description of Artificial Sequence: Synthetic polynucleotide"
atggccctccctgtcaccgccctgctgcttccgctggctcttctgctccacgccgctcggccccaagtgcagcttcaggaaagcggaccgggcctggtcaagccatccgaaactctctccctgacttgcactgtgtctggcggttccatctcatcgtcgtactactactggggctggattaggcagccgcccggaaagggactggagtggatcggaagcatctactattccggctcggcgtactacaaccctagcctcaagtcgagagtgaccatctccgtggatacctccaagaaccagttttccctgcgcctgagctccgtgaccgccgctgacaccgccgtgtactactgtgctcggcattggcaggaatggcccgatgccttcgacatttggggccagggcactatggtcactgtgtcatccgggggtggaggcagcgggggaggagggtccggggggggaggttcagagacaaccttgacccagtcacccgcattcatgtccgccactccgggagacaaggtcatcatctcgtgcaaagcgtcccaggatatcgacgatgccatgaattggtaccagcagaagcctggcgaagcgccgctgttcattatccaatccgcaacctcgcccgtgcctggaatcccaccgcggttcagcggcagcggtttcggaaccgacttttccctgaccattaacaacattgagtccgaggacgccgcctactacttctgcctgcaacacgacaacttccctctcacgttcggccagggaaccaagctggaaatcaagaccactaccccagcaccgaggccacccaccccggctcctaccatcgcctcccagcctctgtccctgcgtccggaggcatgtagacccgcagctggtggggccgtgcatacccggggtcttgacttcgcctgcgatatctacatttgggcccctctggctggtacttgcggggtcctgctgctttcactcgtgatcactctttactgtaagcgcggtcggaagaagctgctgtacatctttaagcaacccttcatgaggcctgtgcagactactcaagaggaggacggctgttcatgccggttcccagaggaggaggaaggcggctgcgaactgcgcgtgaaattcagccgcagcgcagatgctccagcctacaagcaggggcagaaccagctctacaacgaactcaatcttggtcggagagaggagtacgacgtgctggacaagcggagaggacgggacccagaaatgggcgggaagccgcgcagaaagaatccccaagagggcctgtacaacgagctccaaaaggataagatggcagaagcctatagcgagattggtatgaaaggggaacgcagaagaggcaaaggccacgacggactgtaccagggactcagcaccgccaccaaggacacctatgacgctcttcacatgcaggccctgccgcctcgg

SEQ ID NO: 1063 - protein, 244 aa, Artificial Sequence
  source: /note="Description of Artificial Sequence: Synthetic polypeptide"
VNLRESGPALVKPTQTLTLTCTFSGFSLRTSGMCVSWIRQPPGKALEWLARIDWDEDKFYSTSLKTRLTISKDTSDNQVVLRMTNMDPADTATYYCARSGAGGTSATAFDIWGPGTMVTVSSGGGGSGGGGSGGGGSDIQMTQSPSSLSASVGDRVTITCRASQDIYNNLAWFQLKPGSAPRSLMYAANKSQSGVPSRFSGSASGTDFTLTISSLQPEDFATYYCQHYYRFPYSFGQGTKLEIK

SEQ ID NO: 1064 - DNA, 735 bp, Artificial Sequence
  source: /note="Description of Artificial Sequence: Synthetic polynucleotide"
caagtcaatctgcgcgaatccggccccgccttggtcaagcctacccagaccctcactctgacctgtactttctccggcttctccctgcggacttccgggatgtgcgtgtcctggatcagacagcctccgggaaaggccctggagtggctcgctcgcattgactgggatgaggacaagttctactccacctcactcaagaccaggctgaccatcagcaaagatacctctgacaaccaagtggtgctccgcatgaccaacatggacccagccgacactgccacttactactgcgcgaggagcggagcgggcggaacctccgccaccgccttcgatatttggggcccgggtaccatggtcaccgtgtcaagcggaggaggggggtccgggggcggcggttccgggggaggcggatcggacattcagatgactcagtcaccatcgtccctgagcgctagcgtgggcgacagagtgacaatcacttgccgggcatcccaggacatctataacaaccttgcgtggttccagctgaagcctggttccgcaccgcggtcacttatgtacgccgccaacaagagccagtcgggagtgccgtcccggttttccggttcggcctcgggaactgacttcaccctgacgatctccagcctgcaacccgaggatttcgccacctactactgccagcactactaccgctttccctactcgttcggacagggaaccaagctggaaatcaag

SEQ ID NO: 1065 - protein, 123 aa, Artificial Sequence
  source: /note="Description of Artificial Sequence: Synthetic polypeptide"
QVNLRESGPALVKPTQTLTLTCTFSGFSLRTSGMCVSWIRQPPGKALEWLARIDWDEDKFYSTSLKTRLTISKDTSDNQVVLRMTNMDPADTATYYCARSGAGGTSATAFDIWGPGTMVTVSS

SEQ ID NO: 1066 - protein, 107 aa, Artificial Sequence
  source: /note="Description of Artificial Sequence: Synthetic polypeptide"
DIQMTQSPSSLSASVGDRVTITCRASQDIYNNLAWFQLKPGSAPRSLMYAANKSQSGVPSRFSGSASGTDFTLTISSLQPEDFATYYCQHYYRFPYSFGQGTKLEIK

SEQ ID NO: 1067 - protein, 489 aa, Artificial Sequence
  source: /note="Description of Artificial Sequence: Synthetic polypeptide"
MALPVTALLLPLALLLHAARPQVNLRESGPALVKPTQTLTLTCTFSGFSLRTSGMCVSWIRQPPGKALEWLARIDWDEDKFYSTSLKTRLTISKDTSDNQVVLRMTNMDPADTATYYCARSGAGGTSATAFDIWGPGTMVTVSSGGGGSGGGGSGGGGSDIQMTQSPSSLSASVGDRVTITCRASQDIYNNLAWFQLKPGSAPRSLMYAANKSQSGVPSRFSGSASGTDFTLTISSLQPEDFATYYCQHYYRFPYSFGQGTKLEIKTTTPAPRPPTPAPTIASQPLSLRPEACRPAAGGAVHTRGLDFACDIYIWAPLAGTCGVLLLSLVITLYCKRGRKKLLYIFKQPFMRPVQTTQEEDGCSCRFPEEEEGGCELRVKFSRSADAPAYKQGQNQLYNELNLGRREEYDVLDKRRGRDPEMGGKPRRKNPQEGLYNELQKDKMAEAYSEIGMKGERRRGKGHDGLYQGLSTATKDTYDALHMQALPPR

SEQ ID NO: 1068 - DNA, 1467 bp, Artificial Sequence
  source: /note="Description of Artificial Sequence: Synthetic polynucleotide"
atggccctccctgtcaccgccctgctgcttccgctggctcttctgctccacgccgctcggccccaagtcaatctgcgcgaatccggccccgccttggtcaagcctacccagaccctcactctgacctgtactttctccggcttctccctgcggacttccgggatgtgcgtgtcctggatcagacagcctccgggaaaggccctggagtggctcgctcgcattgactgggatgaggacaagttctactccacctcactcaagaccaggctgaccatcagcaaagatacctctgacaaccaagtggtgctccgcatgaccaacatggacccagccgacactgccacttactactgcgcgaggagcggagcgggcggaacctccgccaccgccttcgatatttggggcccgggtaccatggtcaccgtgtcaagcggaggaggggggtccgggggcggcggttccgggggaggcggatcggacattcagatgactcagtcaccatcgtccctgagcgctagcgtgggcgacagagtgacaatcacttgccgggcatcccaggacatctataacaaccttgcgtggttccagctgaagcctggttccgcaccgcggtcacttatgtacgccgccaacaagagccagtcgggagtgccgtcccggttttccggttcggcctcgggaactgacttcaccctgacgatctccagcctgcaacccgaggatttcgccacctactactgccagcactactaccgctttccctactcgttcggacagggaaccaagctggaaatcaagaccactaccccagcaccgaggccacccaccccggctcctaccatcgcctcccagcctctgtccctgcgtccggaggcatgtagacccgcagctggtggggccgtgcatacccggggtcttgacttcgcctgcgatatctacatttgggcccctctggctggtacttgcggggtcctgctgctttcactcgtgatcactctttactgtaagcgcggtcggaagaagctgctgtacatctttaagcaacccttcatgaggcctgtgcagactactcaagaggaggacggctgttcatgccggttcccagaggaggaggaaggcggctgcgaactgcgcgtgaaattcagccgcagcgcagatgctccagcctacaagcaggggcagaaccagctctacaacgaactcaatcttggtcggagagaggagtacgacgtgctggacaagcggagaggacgggacccagaaatgggcgggaagccgcgcagaaagaatccccaagagggcctgtacaacgagctccaaaaggataagatggcagaagcctatagcgagattggtatgaaaggggaacgcagaagaggcaaaggccacgacggactgtaccagggactcagcaccgccaccaaggacacctatgacgctcttcacatgcaggccctgccgcctcgg

SEQ ID NO: 1069 - protein, 246 aa, Artificial Sequence
  source: /note="Description of Artificial Sequence: Synthetic polypeptide"
EVQLVESGGGLVKPGGSLRLSCAASGFTFSSYSMNWVRQAPGKGLEWVSSISSSSSYIYYADSVKGRFTISRDNAKNSLYLQMNSLRAEDTAVYYCAKTIAAVYAFDIWGQGTTVTVSSGGGGSGGGGSGGGGSEIVLTQSPLSLPVTPEEPASISCRSSQSLLHSNGYNYLDWYLQKPGQSPQLLIYLGSNRASGVPDRFSGSGSGTDFTLKISRVEAEDVGVYYCMQALQTPYTFGQGTKLEIK

SEQ ID NO: 1070 - DNA, 738 bp, Artificial Sequence
  source: /note="Description of Artificial Sequence: Synthetic polynucleotide"
gaagtgcagcttgtcgaatccggggggggactggtcaagccgggcggatcactgagactgtcctgcgccgcgagcggcttcacgttctcctcctactccatgaactgggtccgccaagcccccgggaagggactggaatgggtgtcctctatctcctcgtcgtcgtcctacatctactacgccgactccgtgaagggaagattcaccatttcccgcgacaacgcaaagaactcactgtacttgcaaatgaactcactccgggccgaagatactgctgtgtactattgcgccaagactattgccgccgtctacgctttcgacatctggggccagggaaccaccgtgactgtgtcgtccggtggtggtggctcgggcggaggaggaagcggcggcggggggtccgagattgtgctgacccagtcgccactgagcctccctgtgacccccgaggaacccgccagcatcagctgccggtccagccagtccctgctccactccaacggatacaattacctcgattggtaccttcagaagcctggacaaagcccgcagctgctcatctacttgggatcaaaccgcgcgtcaggagtgcctgaccggttctccggctcgggcagcggtaccgatttcaccctgaaaatctccagggtggaggcagaggacgtgggagtgtattactgtatgcaggcgctgcagactccgtacacatttgggcagggcaccaagctggagatcaag

SEQ ID NO: 1071 - protein, 119 aa, Artificial Sequence
  source: /note="Description of Artificial Sequence: Synthetic polypeptide"
EVQLVESGGGLVKPGGSLRLSCAASGFTFSSYSMNWVRQAPGKGLEWVSSISSSSSYIYYADSVKGRFTISRDNAKNSLYLQMNSLRAEDTAVYYCAKTIAAVYAFDIWGQGTTVTVSS

SEQ ID NO: 1072 - protein, 112 aa, Artificial Sequence
  source: /note="Description of Artificial Sequence: Synthetic polypeptide"
EIVLTQSPLSLPVTPEEPASISCRSSQSLLHSNGYNYLDWYLQKPGQSPQLLIYLGSNRASGVPDRFSGSGSGTDFTLKISRVEAEDVGVYYCMQALQTPYTFGQGTKLEIK

SEQ ID NO: 1073 - protein, 490 aa, Artificial Sequence
  source: /note="Description of Artificial Sequence: Synthetic polypeptide"
MALPVTALLLPLALLLHAARPEVQLVESGGGLVKPGGSLRLSCAASGFTFSSYSMNWVRQAPGKGLEWVSSISSSSSYIYYADSVKGRFTISRDNAKNSLYLQMNSLRAEDTAVYYCAKTIAAVYAFDIWGQGTTVTVSSGGGGSGGGGSGGGGSEIVLTQSPLSLPVTPEEPASISCRSSQSLLHSNGYNYLDWYLQKPGQSPQLLIYLGSNRASGVPDRFSGSGSGTDFTLKISRVEAEDVGVYYCMQALQTPYTFGQGTKLEIKTTTPAPRPPTPAPTIASQPLSLRPEACRPAAGGAVHTRGLDFACDIYIWAPLAGTCGVLLLSLVITLYCKRGRKKLLYIFKQPFMRPVQTTQEEDGCSCRFPEEEEGGCELRVKFSRSADAPAYKQGQNQLYNELNLGRREEYDVLDKRRGRDPEMGGKPRRKNPQEGLYNELQKDKMAEAYSEIGMKGERRRGKGHDGLYQGLSTATKDTYDALHMQALPPR

SEQ ID NO: 1074 - DNA, 1470 bp, Artificial Sequence
  source: /note="Description of Artificial Sequence: Synthetic polynucleotide"
atggccctccctgtcaccgccctgctgcttccgctggctcttctgctccacgccgctcggcccgaagtgcagcttgtcgaatccggggggggactggtcaagccgggcggatcactgagactgtcctgcgccgcgagcggcttcacgttctcctcctactccatgaactgggtccgccaagcccccgggaagggactggaatgggtgtcctctatctcctcgtcgtcgtcctacatctactacgccgactccgtgaagggaagattcaccatttcccgcgacaacgcaaagaactcactgtacttgcaaatgaactcactccgggccgaagatactgctgtgtactattgcgccaagactattgccgccgtctacgctttcgacatctggggccagggaaccaccgtgactgtgtcgtccggtggtggtggctcgggcggaggaggaagcggcggcggggggtccgagattgtgctgacccagtcgccactgagcctccctgtgacccccgaggaacccgccagcatcagctgccggtccagccagtccctgctccactccaacggatacaattacctcgattggtaccttcagaagcctggacaaagcccgcagctgctcatctacttgggatcaaaccgcgcgtcaggagtgcctgaccggttctccggctcgggcagcggtaccgatttcaccctgaaaatctccagggtggaggcagaggacgtgggagtgtattactgtatgcaggcgctgcagactccgtacacatttgggcagggcaccaagctggagatcaagaccactaccccagcaccgaggccacccaccccggctcctaccatcgcctcccagcctctgtccctgcgtccggaggcatgtagacccgcagctggtggggccgtgcatacccggggtcttgacttcgcctgcgatatctacatttgggcccctctggctggtacttgcggggtcctgctgctttcactcgtgatcactctttactgtaagcgcggtcggaagaagctgctgtacatctttaagcaacccttcatgaggcctgtgcagactactcaagaggaggacggctgttcatgccggttcccagaggaggaggaaggcggctgcgaactgcgcgtgaaattcagccgcagcgcagatgctccagcctacaagcaggggcagaaccagctctacaacgaactcaatcttggtcggagagaggagtacgacgtgctggacaagcggagaggacgggacccagaaatgggcgggaagccgcgcagaaagaatccccaagagggcctgtacaacgagctccaaaaggataagatggcagaagcctatagcgagattggtatgaaaggggaacgcagaagaggcaaaggccacgacggactgtaccagggactcagcaccgccaccaaggacacctatgacgctcttcacatgcaggccctgccgcctcgg

SEQ ID NO: 1075 - protein, 240 aa, Artificial Sequence
  source: /note="Description of Artificial Sequence: Synthetic polypeptide"
EVQLVESGGGLVKPGGSLRLSCAASGFTFSDYYMSWIRQAPGKGLEWVSYISSSGSTIYYADSVKGRFTISRDNAKNSLYLQMNSLRAEDTAVYYCARDLRGAFDIWGQGTMVTVSSGGGGSGGGGSGGGGSSYVLTQSPSVSAAPGYTATISCGGNNIGTKSVHWYQQKPGQAPLLVIRDDSVRPSKIPGRFSGSNSGNMATLTISGVQAGDEADFYCQVWDSDSEHVVFGGGTKLTVL

SEQ ID NO: 1076 - DNA, 720 bp, Artificial Sequence
  source: /note="Description of Artificial Sequence: Synthetic polynucleotide"
gaagtccagctcgtggagtccggcggaggccttgtgaagcctggaggttcgctgagactgtcctgcgccgcctccggcttcaccttctccgactactacatgtcctggatcagacaggccccgggaaagggcctggaatgggtgtcctacatctcgtcatcgggcagcactatctactacgcggactcagtgaaggggcggttcaccatttcccgggataacgcgaagaactcgctgtatctgcaaatgaactcactgagggccgaggacaccgccgtgtactactgcgcccgcgatctccgcggggcatttgacatctggggacagggaaccatggtcacagtgtccagcggagggggaggatcgggtggcggaggttccgggggtggaggctcctcctacgtgctgactcagagcccaagcgtcagcgctgcgcccggttacacggcaaccatctcctgtggcggaaacaacattgggaccaagtctgtgcactggtatcagcagaagccgggccaagctcccctgttggtgatccgcgatgactccgtgcggcctagcaaaattccgggacggttctccggctccaacagcggcaatatggccactctcaccatctcgggagtgcaggccggagatgaagccgacttctactgccaagtctgggactcagactccgagcatgtggtgttcgggggcggaaccaagctgactgtgctc

SEQ ID NO: 1077 - protein, 117 aa, Artificial Sequence
  source: /note="Description of Artificial Sequence: Synthetic polypeptide"
EVQLVESGGGLVKPGGSLRLSCAASGFTFSDYYMSWIRQAPGKGLEWVSYISSSGSTIYYADSVKGRFTISRDNAKNSLYLQMNSLRAEDTAVYYCARDLRGAFDIWGQGTMVTVSS

SEQ ID NO: 1078 - protein, 108 aa, Artificial Sequence
  source: /note="Description of Artificial Sequence: Synthetic polypeptide"
SYVLTQSPSVSAAPGYTATISCGGNNIGTKSVHWYQQKPGQAPLLVIRDDSVRPSKIPGRFSGSNSGNMATLTISGVQAGDEADFYCQVWDSDSEHVVFGGGTKLTVL

SEQ ID NO: 1079 - protein, 484 aa, Artificial Sequence
  source: /note="Description of Artificial Sequence: Synthetic polypeptide"
MALPVTALLLPLALLLHAARPEVQLVESGGGLVKPGGSLRLSCAASGFTFSDYYMSWIRQAPGKGLEWVSYISSSGSTIYYADSVKGRFTISRDNAKNSLYLQMNSLRAEDTAVYYCARDLRGAFDIWGQGTMVTVSSGGGGSGGGGSGGGGSSYVLTQSPSVSAAPGYTATISCGGNNIGTKSVHWYQQKPGQAPLLVIRDDSVRPSKIPGRFSGSNSGNMATLTISGVQAGDEADFYCQVWDSDSEHVVFGGGTKLTVLTTTPAPRPPTPAPTIASQPLSLRPEACRPAAGGAVHTRGLDFACDIYIWAPLAGTCGVLLLSLVITLYCKRGRKKLLYIFKQPFMRPVQTTQEEDGCSCRFPEEEEGGCELRVKFSRSADAPAYKQGQNQLYNELNLGRREEYDVLDKRRGRDPEMGGKPRRKNPQEGLYNELQKDKMAEAYSEIGMKGERRRGKGHDGLYQGLSTATKDTYDALHMQALPPR

SEQ ID NO: 1080 - DNA, 1452 bp, Artificial Sequence
  source: /note="Description of Artificial Sequence: Synthetic polynucleotide"
atggccctccctgtcaccgccctgctgcttccgctggctcttctgctccacgccgctcggcccgaagtccagctcgtggagtccggcggaggccttgtgaagcctggaggttcgctgagactgtcctgcgccgcctccggcttcaccttctccgactactacatgtcctggatcagacaggccccgggaaagggcctggaatgggtgtcctacatctcgtcatcgggcagcactatctactacgcggactcagtgaaggggcggttcaccatttcccgggataacgcgaagaactcgctgtatctgcaaatgaactcactgagggccgaggacaccgccgtgtactactgcgcccgcgatctccgcggggcatttgacatctggggacagggaaccatggtcacagtgtccagcggagggggaggatcgggtggcggaggttccgggggtggaggctcctcctacgtgctgactcagagcccaagcgtcagcgctgcgcccggttacacggcaaccatctcctgtggcggaaacaacattgggaccaagtctgtgcactggtatcagcagaagccgggccaagctcccctgttggtgatccgcgatgactccgtgcggcctagcaaaattccgggacggttctccggctccaacagcggcaatatggccactctcaccatctcgggagtgcaggccggagatgaagccgacttctactgccaagtctgggactcagactccgagcatgtggtgttcgggggcggaaccaagctgactgtgctcaccactaccccagcaccgaggccacccaccccggctcctaccatcgcctcccagcctctgtccctgcgtccggaggcatgtagacccgcagctggtggggccgtgcatacccggggtcttgacttcgcctgcgatatctacatttgggcccctctggctggtacttgcggggtcctgctgctttcactcgtgatcactctttactgtaagcgcggtcggaagaagctgctgtacatctttaagcaacccttcatgaggcctgtgcagactactcaagaggaggacggctgttcatgccggttcccagaggaggaggaaggcggctgcgaactgcgcgtgaaattcagccgcagcgcagatgctccagcctacaagcaggggcagaaccagctctacaacgaactcaatcttggtcggagagaggagtacgacgtgctggacaagcggagaggacgggacccagaaatgggcgggaagccgcgcagaaagaatccccaagagggcctgtacaacgagctccaaaaggataagatggcagaagcctatagcgagattggtatgaaaggggaacgcagaagaggcaaaggccacgacggactgtaccagggactcagcaccgccaccaaggacacctatgacgctcttcacatgcaggccctgccgcctcgg

SEQ ID NO: 1081 - protein, 241 aa, Artificial Sequence
  source: /note="Description of Artificial Sequence: Synthetic polypeptide"
QVQLVQSGAEVKKPGASVKVSCKPSGYTVTSHYIHWVRRAPGQGLEWMGMINPSGGVTAYSQTLQGRVTMTSDTSSSTVYMELSSLRSEDTAMYYCAREGSGSGWYFDFWGRGTLVTVSSGGGGSGGGGSGGGGSSYVLTQPPSVSVSPGQTASITCSGDGLSKKYVSWYQQKAGQSPVVLISRDKERPSGIPDRFSGSNSADTATLTISGTQAMDEADYYCQAWDDTTVVFGGGTKLTVL

SEQ ID NO: 1082 - DNA, 723 bp, Artificial Sequence
  source: /note="Description of Artificial Sequence: Synthetic polynucleotide"
caagtgcagctggtgcagagcggggccgaagtcaagaagccgggagcctccgtgaaagtgtcctgcaagccttcgggatacaccgtgacctcccactacattcattgggtccgccgcgcccccggccaaggactcgagtggatgggcatgatcaaccctagcggcggagtgaccgcgtacagccagacgctgcagggacgcgtgactatgacctcggatacctcctcctccaccgtctatatggaactgtccagcctgcggtccgaggataccgccatgtactactgcgcccgggaaggatcaggctccgggtggtatttcgacttctggggaagaggcaccctcgtgactgtgtcatctgggggagggggttccggtggtggcggatcgggaggaggcggttcatcctacgtgctgacccagccaccctccgtgtccgtgagccccggccagactgcatcgattacatgtagcggcgacggcctctccaagaaatacgtgtcgtggtaccagcagaaggccggacagagcccggtggtgctgatctcaagagataaggagcggcctagcggaatcccggacaggttctcgggttccaactccgcggacactgctactctgaccatctcggggacccaggctatggacgaagccgattactactgccaagcctgggacgacactactgtcgtgtttggagggggcaccaagttgaccgtcctt

SEQ ID NO: 1083 - protein, 120 aa, Artificial Sequence
  source: /note="Description of Artificial Sequence: Synthetic polypeptide"
QVQLVQSGAEVKKPGASVKVSCKPSGYTVTSHYIHWVRRAPGQGLEWMGMINPSGGVTAYSQTLQGRVTMTSDTSSSTVYMELSSLRSEDTAMYYCAREGSGSGWYFDFWGRGTLVTVSS

SEQ ID NO: 1084 - protein, 106 aa, Artificial Sequence
  source: /note="Description of Artificial Sequence: Synthetic polypeptide"
SYVLTQPPSVSVSPGQTASITCSGDGLSKKYVSWYQQKAGQSPVVLISRDKERPSGIPDRFSGSNSADTATLTISGTQAMDEADYYCQAWDDTTVVFGGGTKLTVL

SEQ ID NO: 1085 - protein, 485 aa, Artificial Sequence
  source: /note="Description of Artificial Sequence: Synthetic polypeptide"
MALPVTALLLPLALLLHAARPQVQLVQSGAEVKKPGASVKVSCKPSGYTVTSHYIHWVRRAPGQGLEWMGMINPSGGVTAYSQTLQGRVTMTSDTSSSTVYMELSSLRSEDTAMYYCAREGSGSGWYFDFWGRGTLVTVSSGGGGSGGGGSGGGGSSYVLTQPPSVSVSPGQTASITCSGDGLSKKYVSWYQQKAGQSPVVLISRDKERPSGIPDRFSGSNSADTATLTISGTQAMDEADYYCQAWDDTTVVFGGGTKLTVLTTTPAPRPPTPAPTIASQPLSLRPEACRPAAGGAVHTRGLDFACDIYIWAPLAGTCGVLLLSLVITLYCKRGRKKLLYIFKQPFMRPVQTTQEEDGCSCRFPEEEEGGCELRVKFSRSADAPAYKQGQNQLYNELNLGRREEYDVLDKRRGRDPEMGGKPRRKNPQEGLYNELQKDKMAEAYSEIGMKGERRRGKGHDGLYQGLSTATKDTYDALHMQALPPR

SEQ ID NO: 1086 - DNA, 1455 bp, Artificial Sequence
  source: /note="Description of Artificial Sequence: Synthetic polynucleotide"
atggccctccctgtcaccgccctgctgcttccgctggctcttctgctccacgccgctcggccccaagtgcagctggtgcagagcggggccgaagtcaagaagccgggagcctccgtgaaagtgtcctgcaagccttcgggatacaccgtgacctcccactacattcattgggtccgccgcgcccccggccaaggactcgagtggatgggcatgatcaaccctagcggcggagtgaccgcgtacagccagacgctgcagggacgcgtgactatgacctcggatacctcctcctccaccgtctatatggaactgtccagcctgcggtccgaggataccgccatgtactactgcgcccgggaaggatcaggctccgggtggtatttcgacttctggggaagaggcaccctcgtgactgtgtcatctgggggagggggttccggtggtggcggatcgggaggaggcggttcatcctacgtgctgacccagccaccctccgtgtccgtgagccccggccagactgcatcgattacatgtagcggcgacggcctctccaagaaatacgtgtcgtggtaccagcagaaggccggacagagcccggtggtgctgatctcaagagataaggagcggcctagcggaatcccggacaggttctcgggttccaactccgcggacactgctactctgaccatctcggggacccaggctatggacgaagccgattactactgccaagcctgggacgacactactgtcgtgtttggagggggcaccaagttgaccgtccttaccactaccccagcaccgaggccacccaccccggctcctaccatcgcctcccagcctctgtccctgcgtccggaggcatgtagacccgcagctggtggggccgtgcatacccggggtcttgacttcgcctgcgatatctacatttgggcccctctggctggtacttgcggggtcctgctgctttcactcgtgatcactctttactgtaagcgcggtcggaagaagctgctgtacatctttaagcaacccttcatgaggcctgtgcagactactcaagaggaggacggctgttcatgccggttcccagaggaggaggaaggcggctgcgaactgcgcgtgaaattcagccgcagcgcagatgctccagcctacaagcaggggcagaaccagctctacaacgaactcaatcttggtcggagagaggagtacgacgtgctggacaagcggagaggacgggacccagaaatgggcgggaagccgcgcagaaagaatccccaagagggcctgtacaacgagctccaaaaggataagatggcagaagcctatagcgagattggtatgaaaggggaacgcagaagaggcaaaggccacgacggactgtaccagggactcagcaccgccaccaaggacacctatgacgctcttcacatgcaggccctgccgcctcgg

SEQ ID NO: 1087 - protein, 245 aa, Artificial Sequence
  source: /note="Description of Artificial Sequence: Synthetic polypeptide"
QVQLQESGPGLVKPSQTLSLTCTVSGGSISSGGYYWSWIRQHPGKGLEWIGYIYYSGSTYYNPSLKSRVTISVDTSKNQFSLKLSSVTAADTAVYYCARAGIAARLRGAFDIWGQGTMVTVSSGGGGSGGGGSGGGGSDIVMTQSPSSVSASVGDRVIITCRASQGIRNWLAWYQQKPGKAPNLLIYAASNLQSGVPSRFSGSGSGADFTLTISSLQPEDVATYYCQKYNSAPFTFGPGTKVDIK

SEQ ID NO: 1088 - DNA, 735 bp, Artificial Sequence
  source: /note="Description of Artificial Sequence: Synthetic polynucleotide"
caagtgcagcttcaggagagcggcccgggactcgtgaagccgtcccagaccctgtccctgacttgcaccgtgtcgggaggaagcatctcgagcggaggctactattggtcgtggattcggcagcaccctggaaagggcctggaatggatcggctacatctactactccggctcgacctactacaacccatcgctgaagtccagagtgacaatctcagtggacacgtccaagaatcagttcagcctgaagctctcttccgtgactgcggccgacaccgccgtgtactactgcgcacgcgctggaattgccgcccggctgaggggtgccttcgacatttggggacagggcaccatggtcaccgtgtcctccggcggcggaggttccgggggtggaggctcaggaggaggggggtccgacatcgtcatgactcagtcgccctcaagcgtcagcgcgtccgtcggggacagagtgatcatcacctgtcgggcgtcccagggaattcgcaactggctggcctggtatcagcagaagcccggaaaggcccccaacctgttgatctacgccgcctcaaacctccaatccggggtgccgagccgcttcagcggctccggttcgggtgccgatttcactctgaccatctcctccctgcaacctgaagatgtggctacctactactgccaaaagtacaactccgcaccttttactttcggaccggggaccaaagtggacattaag

SEQ ID NO: 1089 - protein, 123 aa, Artificial Sequence
  source: /note="Description of Artificial Sequence: Synthetic polypeptide"
QVQLQESGPGLVKPSQTLSLTCTVSGGSISSGGYYWSWIRQHPGKGLEWIGYIYYSGSTYYNPSLKSRVTISVDTSKNQFSLKLSSVTAADTAVYYCARAGIAARLRGAFDIWGQGTMVTVSS

SEQ ID NO: 1090 - protein, 107 aa, Artificial Sequence
  source: /note="Description of Artificial Sequence: Synthetic polypeptide"
DIVMTQSPSSVSASVGDRVIITCRASQGIRNWLAWYQQKPGKAPNLLIYAASNLQSGVPSRFSGSGSGADFTLTISSLQPEDVATYYCQKYNSAPFTFGPGTKVDIK

SEQ ID NO: 1091 - protein, 489 aa, Artificial Sequence
  source: /note="Description of Artificial Sequence: Synthetic polypeptide"
MALPVTALLLPLALLLHAARPQVQLQESGPGLVKPSQTLSLTCTVSGGSISSGGYYWSWIRQHPGKGLEWIGYIYYSGSTYYNPSLKSRVTISVDTSKNQFSLKLSSVTAADTAVYYCARAGIAARLRGAFDIWGQGTMVTVSSGGGGSGGGGSGGGGSDIVMTQSPSSVSASVGDRVIITCRASQGIRNWLAWYQQKPGKAPNLLIYAASNLQSGVPSRFSGSGSGADFTLTISSLQPEDVATYYCQKYNSAPFTFGPGTKVDIKTTTPAPRPPTPAPTIASQPLSLRPEACRPAAGGAVHTRGLDFACDIYIWAPLAGTCGVLLLSLVITLYCKRGRKKLLYIFKQPFMRPVQTTQEEDGCSCRFPEEEEGGCELRVKFSRSADAPAYKQGQNQLYNELNLGRREEYDVLDKRRGRDPEMGGKPRRKNPQEGLYNELQKDKMAEAYSEIGMKGERRRGKGHDGLYQGLSTATKDTYDALHMQALPPR

SEQ ID NO: 1092 - DNA, 1467 bp, Artificial Sequence
  source: /note="Description of Artificial Sequence: Synthetic polynucleotide"
atggccctccctgtcaccgccctgctgcttccgctggctcttctgctccacgccgctcggccccaagtgcagcttcaggagagcggcccgggactcgtgaagccgtcccagaccctgtccctgacttgcaccgtgtcgggaggaagcatctcgagcggaggctactattggtcgtggattcggcagcaccctggaaagggcctggaatggatcggctacatctactactccggctcgacctactacaacccatcgctgaagtccagagtgacaatctcagtggacacgtccaagaatcagttcagcctgaagctctcttccgtgactgcggccgacaccgccgtgtactactgcgcacgcgctggaattgccgcccggctgaggggtgccttcgacatttggggacagggcaccatggtcaccgtgtcctccggcggcggaggttccgggggtggaggctcaggaggaggggggtccgacatcgtcatgactcagtcgccctcaagcgtcagcgcgtccgtcggggacagagtgatcatcacctgtcgggcgtcccagggaattcgcaactggctggcctggtatcagcagaagcccggaaaggcccccaacctgttgatctacgccgcctcaaacctccaatccggggtgccgagccgcttcagcggctccggttcgggtgccgatttcactctgaccatctcctccctgcaacctgaagatgtggctacctactactgccaaaagtacaactccgcaccttttactttcggaccggggaccaaagtggacattaagaccactaccccagcaccgaggccacccaccccggctcctaccatcgcctcccagcctctgtccctgcgtccggaggcatgtagacccgcagctggtggggccgtgcatacccggggtcttgacttcgcctgcgatatctacatttgggcccctctggctggtacttgcggggtcctgctgctttcactcgtgatcactctttactgtaagcgcggtcggaagaagctgctgtacatctttaagcaacccttcatgaggcctgtgcagactactcaagaggaggacggctgttcatgccggttcccagaggaggaggaaggcggctgcgaactgcgcgtgaaattcagccgcagcgcagatgctccagcctacaagcaggggcagaaccagctctacaacgaactcaatcttggtcggagagaggagtacgacgtgctggacaagcggagaggacgggacccagaaatgggcgggaagccgcgcagaaagaatccccaagagggcctgtacaacgagctccaaaaggataagatggcagaagcctatagcgagattggtatgaaaggggaacgcagaagaggcaaaggccacgacggactgtaccagggactcagcaccgccaccaaggacacctatgacgctcttcacatgcaggccctgccgcctcgg

SEQ ID NO: 1093 - protein, 253 aa, Artificial Sequence
  source: /note="Description of Artificial Sequence: Synthetic polypeptide"
QVQLVQSGAEVKKPGSSVKVSCKASGGTFSSYAISWVRQAPGQGLEWMGGIIPIFGTANYAQKFQGRVTITADESTSTAYMELSSLRSEDTAVYYCARRGGYQLLRWDVGLLRSAFDIWGQGTMVTVSSGGGGSGGGGSGGGGSSYVLTQPPSVSVAPGQTARITCGGNNIGSKSVHWYQQKPGQAPVLVLYGKNNRPSGVPDRFSGSRSGTTASLTITGAQAEDEADYYCSSRDSSGDHLRVFGTGTKVTVL

SEQ ID NO: 1094 - DNA, 759 bp, Artificial Sequence
  source: /note="Description of Artificial Sequence: Synthetic polynucleotide"
caagtgcagctggtccagtcgggcgccgaggtcaagaagcccgggagctctgtgaaagtgtcctgcaaggcctccgggggcacctttagctcctacgccatctcctgggtccgccaagcaccgggtcaaggcctggagtggatggggggaattatccctatcttcggcactgccaactacgcccagaagttccagggacgcgtgaccattaccgcggacgaatccacctccaccgcttatatggagctgtccagcttgcgctcggaagataccgccgtgtactactgcgcccggaggggtggataccagctgctgagatgggacgtgggcctcctgcggtcggcgttcgacatctggggccagggcactatggtcactgtgtccagcggaggaggcggatcgggaggcggcggatcagggggaggcggttccagctacgtgcttactcaacccccttcggtgtccgtggccccgggacagaccgccagaatcacttgcggaggaaacaacattgggtccaagagcgtgcattggtaccagcagaagccaggacaggcccctgtgctggtgctctacgggaagaacaatcggcccagcggagtgccggacaggttctcgggttcacgctccggtacaaccgcttcactgactatcaccggggcccaggcagaggatgaagcggactactactgttcctcccgggattcatccggcgaccacctccgggtgttcggaaccggaacgaaggtcaccgtgctg

SEQ ID NO: 1095 - protein, 129 aa, Artificial Sequence
  source: /note="Description of Artificial Sequence: Synthetic polypeptide"
QVQLVQSGAEVKKPGSSVKVSCKASGGTFSSYAISWVRQAPGQGLEWMGGIIPIFGTANYAQKFQGRVTITADESTSTAYMELSSLRSEDTAVYYCARRGGYQLLRWDVGLLRSAFDIWGQGTMVTVSS

SEQ ID NO: 1096 - protein, 109 aa, Artificial Sequence
  source: /note="Description of Artificial Sequence: Synthetic polypeptide"
SYVLTQPPSVSVAPGQTARITCGGNNIGSKSVHWYQQKPGQAPVLVLYGKNNRPSGVPDRFSGSRSGTTASLTITGAQAEDEADYYCSSRDSSGDHLRVFGTGTKVTVL

SEQ ID NO: 1097 - protein, 497 aa, Artificial Sequence
  source: /note="Description of Artificial Sequence: Synthetic polypeptide"
MALPVTALLLPLALLLHAARPQVQLVQSGAEVKKPGSSVKVSCKASGGTFSSYAISWVRQAPGQGLEWMGGIIPIFGTANYAQKFQGRVTITADESTSTAYMELSSLRSEDTAVYYCARRGGYQLLRWDVGLLRSAFDIWGQGTMVTVSSGGGGSGGGGSGGGGSSYVLTQPPSVSVAPGQTARITCGGNNIGSKSVHWYQQKPGQAPVLVLYGKNNRPSGVPDRFSGSRSGTTASLTITGAQAEDEADYYCSSRDSSGDHLRVFGTGTKVTVLTTTPAPRPPTPAPTIASQPLSLRPEACRPAAGGAVHTRGLDFACDIYIWAPLAGTCGVLLLSLVITLYCKRGRKKLLYIFKQPFMRPVQTTQEEDGCSCRFPEEEEGGCELRVKFSRSADAPAYKQGQNQLYNELNLGRREEYDVLDKRRGRDPEMGGKPRRKNPQEGLYNELQKDKMAEAYSEIGMKGERRRGKGHDGLYQGLSTATKDTYDALHMQALPPR

SEQ ID NO: 1098 - DNA, 1491 bp, Artificial Sequence
  source: /note="Description of Artificial Sequence: Synthetic polynucleotide"
atggccctccctgtcaccgccctgctgcttccgctggctcttctgctccacgccgctcggccccaagtgcagctggtccagtcgggcgccgaggtcaagaagcccgggagctctgtgaaagtgtcctgcaaggcctccgggggcacctttagctcctacgccatctcctgggtccgccaagcaccgggtcaaggcctggagtggatggggggaattatccctatcttcggcactgccaactacgcccagaagttccagggacgcgtgaccattaccgcggacgaatccacctccaccgcttatatggagctgtccagcttgcgctcggaagataccgccgtgtactactgcgcccggaggggtggataccagctgctgagatgggacgtgggcctcctgcggtcggcgttcgacatctggggccagggcactatggtcactgtgtccagcggaggaggcggatcgggaggcggcggatcagggggaggcggttccagctacgtgcttactcaacccccttcggtgtccgtggccccgggacagaccgccagaatcacttgcggaggaaacaacattgggtccaagagcgtgcattggtaccagcagaagccaggacaggcccctgtgctggtgctctacgggaagaacaatcggcccagcggagtgccggacaggttctcgggttcacgctccggtacaaccgcttcactgactatcaccggggcccaggcagaggatgaagcggactactactgttcctcccgggattcatccggcgaccacctccgggtgttcggaaccggaacgaaggtcaccgtgctgaccactaccccagcaccgaggccacccaccccggctcctaccatcgcctcccagcctctgtccctgcgtccggaggcatgtagacccgcagctggtggggccgtgcatacccggggtcttgacttcgcctgcgatatctacatttgggcccctctggctggtacttgcggggtcctgctgctttcactcgtgatcactctttactgtaagcgcggtcggaagaagctgctgtacatctttaagcaacccttcatgaggcctgtgcagactactcaagaggaggacggctgttcatgccggttcccagaggaggaggaaggcggctgcgaactgcgcgtgaaattcagccgcagcgcagatgctccagcctacaagcaggggcagaaccagctctacaacgaactcaatcttggtcggagagaggagtacgacgtgctggacaagcggagaggacgggacccagaaatgggcgggaagccgcgcagaaagaatccccaagagggcctgtacaacgagctccaaaaggataagatggcagaagcctatagcgagattggtatgaaaggggaacgcagaagaggcaaaggccacgacggactgtaccagggactcagcaccgccaccaaggacacctatgacgctcttcacatgcaggccctgccgcctcgg

SEQ ID NO: 1099 - protein, 248 aa, Artificial Sequence
  source: /note="Description of Artificial Sequence: Synthetic polypeptide"
EVQLQQSGPGLVKPSQTLSLTCAISGDSVSSNSAAWNWIRQSPSRGLEWLGRTYYRSKWYSFYAISLKSRIIINPDTSKNQFSLQLKSVTPEDTAVYYCARSSPEGLFLYWFDPWGQGTLVTVSSGGDGSGGGGSGGGGSSSELTQDPAVSVALGQTIRITCQGDSLGNYYATWYQQKPGQAPVLVIYGTNNRPSGIPDRFSASSSGNTASLTITGAQAEDEADYYCNSRDSSGHHLLFGTGTKVTVL

SEQ ID NO: 1100 - DNA, 744 bp, Artificial Sequence
  source: /note="Description of Artificial Sequence: Synthetic polynucleotide"
gaagtgcagctccaacagtcaggaccggggctcgtgaagccatcccagaccctgtccctgacttgtgccatctcgggagatagcgtgtcatcgaactccgccgcctggaactggattcggcagagcccgtcccgcggactggagtggcttggaaggacctactaccggtccaagtggtactctttctacgcgatctcgctgaagtcccgcattatcattaaccctgatacctccaagaatcagttctccctccaactgaaatccgtcacccccgaggacacagcagtgtattactgcgcacggagcagccccgaaggactgttcctgtattggtttgacccctggggccaggggactcttgtgaccgtgtcgagcggcggagatgggtccggtggcggtggttcggggggcggcggatcatcatccgaactgacccaggacccggctgtgtccgtggcgctgggacaaaccatccgcattacgtgccagggagactccctgggcaactactacgccacttggtaccagcagaagccgggccaagcccctgtgttggtcatctacgggaccaacaacagaccttccggcatccccgaccggttcagcgcttcgtcctccggcaacactgccagcctgaccatcactggagcgcaggccgaagatgaggccgactactactgcaacagcagagactcctcgggtcatcacctcttgttcggaactggaaccaaggtcaccgtgctg

SEQ ID NO: 1101 - protein, 125 aa, Artificial Sequence
  source: /note="Description of Artificial Sequence: Synthetic polypeptide"
EVQLQQSGPGLVKPSQTLSLTCAISGDSVSSNSAAWNWIRQSPSRGLEWLGRTYYRSKWYSFYAISLKSRIIINPDTSKNQFSLQLKSVTPEDTAVYYCARSSPEGLFLYWFDPWGQGTLVTVSS

SEQ ID NO: 1102 - protein, 108 aa, Artificial Sequence
  source: /note="Description of Artificial Sequence: Synthetic polypeptide"
SSELTQDPAVSVALGQTIRITCQGDSLGNYYATWYQQKPGQAPVLVIYGTNNRPSGIPDRFSASSSGNTASLTITGAQAEDEADYYCNSRDSSGHHLLFGTGTKVTVL

SEQ ID NO: 1103 - protein, 492 aa, Artificial Sequence
  source: /note="Description of Artificial Sequence: Synthetic polypeptide"
MALPVTALLLPLALLLHAARPEVQLQQSGPGLVKPSQTLSLTCAISGDSVSSNSAAWNWIRQSPSRGLEWLGRTYYRSKWYSFYAISLKSRIIINPDTSKNQFSLQLKSVTPEDTAVYYCARSSPEGLFLYWFDPWGQGTLVTVSSGGDGSGGGGSGGGGSSSELTQDPAVSVALGQTIRITCQGDSLGNYYATWYQQKPGQAPVLVIYGTNNRPSGIPDRFSASSSGNTASLTITGAQAEDEADYYCNSRDSSGHHLLFGTGTKVTVLTTTPAPRPPTPAPTIASQPLSLRPEACRPAAGGAVHTRGLDFACDIYIWAPLAGTCGVLLLSLVITLYCKRGRKKLLYIFKQPFMRPVQTTQEEDGCSCRFPEEEEGGCELRVKFSRSADAPAYKQGQNQLYNELNLGRREEYDVLDKRRGRDPEMGGKPRRKNPQEGLYNELQKDKMAEAYSEIGMKGERRRGKGHDGLYQGLSTATKDTYDALHMQALPPR

SEQ ID NO: 1104 - DNA, 1476 bp, Artificial Sequence
  source: /note="Description of Artificial Sequence: Synthetic polynucleotide"
atggccctccctgtcaccgccctgctgcttccgctggctcttctgctccacgccgctcggcccgaagtgcagctccaacagtcaggaccggggctcgtgaagccatcccagaccctgtccctgacttgtgccatctcgggagatagcgtgtcatcgaactccgccgcctggaactggattcggcagagcccgtcccgcggactggagtggcttggaaggacctactaccggtccaagtggtactctttctacgcgatctcgctgaagtcccgcattatcattaaccctgatacctccaagaatcagttctccctccaactgaaatccgtcacccccgaggacacagcagtgtattactgcgcacggagcagccccgaaggactgttcctgtattggtttgacccctggggccaggggactcttgtgaccgtgtcgagcggcggagatgggtccggtggcggtggttcggggggcggcggatcatcatccgaactgacccaggacccggctgtgtccgtggcgctgggacaaaccatccgcattacgtgccagggagactccctgggcaactactacgccacttggtaccagcagaagccgggccaagcccctgtgttggtcatctacgggaccaacaacagaccttccggcatccccgaccggttcagcgcttcgtcctccggcaacactgccagcctgaccatcactggagcgcaggccgaagatgaggccgactactactgcaacagcagagactcctcgggtcatcacctcttgttcggaactggaaccaaggtcaccgtgctgaccactaccccagcaccgaggccacccaccccggctcctaccatcgcctcccagcctctgtccctgcgtccggaggcatgtagacccgcagctggtggggccgtgcatacccggggtcttgacttcgcctgcgatatctacatttgggcccctctggctggtacttgcggggtcctgctgctttcactcgtgatcactctttactgtaagcgcggtcggaagaagctgctgtacatctttaagcaacccttcatgaggcctgtgcagactactcaagaggaggacggctgttcatgccggttcccagaggaggaggaaggcggctgcgaactgcgcgtgaaattcagccgcagcgcagatgctccagcctacaagcaggggcagaaccagctctacaacgaactcaatcttggtcggagagaggagtacgacgtgctggacaagcggagaggacgggacccagaaatgggcgggaagccgcgcagaaagaatccccaagagggcctgtacaacgagctccaaaaggataagatggcagaagcctatagcgagattggtatgaaaggggaacgcagaagaggcaaaggccacgacggactgtaccagggactcagcaccgccaccaaggacacctatgacgctcttcacatgcaggccctgccgcctcgg

SEQ ID NO: 1105 - protein, 246 aa, Artificial Sequence
  source: /note="Description of Artificial Sequence: Synthetic polypeptide"
EVQLVESGGGLVQPGGSLRLSCAASGFTFSSYAMSWVRQAPGKGLEWVSAISGSGGSTYYADSVKGRFTISRDNSKNTLYLQMNSLRAEDTAVYYCAKVEGSGSLDYWGQGTLVTVSSGGGGSGGGGSGGGGSEIVMTQSPGTLSLSPGERATLSCRASQSVSSAYLAWYQQKPGQPPRLLISGASTRATGIPDRFGGSGSGTDFTLTISRLEPEDFAVYYCQHYGSSFNGSSLFTFGQGTRLEIK

SEQ ID NO: 1106 - DNA, 738 bp, Artificial Sequence
  source: /note="Description of Artificial Sequence: Synthetic polynucleotide"
gaagtgcagctcgtggagtcaggaggcggcctggtccagccgggagggtcccttagactgtcatgcgccgcaagcggattcactttctcctcctatgccatgagctgggtccgccaagcccccggaaagggactggaatgggtgtccgccatctcggggtctggaggctcaacttactacgctgactccgtgaagggacggttcaccattagccgcgacaactccaagaacaccctctacctccaaatgaactccctgcgggccgaggataccgccgtctactactgcgccaaagtggaaggttcaggatcgctggactactggggacagggtactctcgtgaccgtgtcatcgggcggaggaggttccggcggtggcggctccggcggcggagggtcggagatcgtgatgacccagagccctggtactctgagcctttcgccgggagaaagggccaccctgtcctgccgcgcttcccaatccgtgtcctccgcgtacttggcgtggtaccagcagaagccgggacagccccctcggctgctgatcagcggggccagcacccgggcaaccggaatcccagacagattcgggggttccggcagcggcacagatttcaccctgactatttcgaggttggagcccgaggactttgcggtgtattactgtcagcactacgggtcgtcctttaatggctccagcctgttcacgttcggacaggggacccgcctggaaatcaag

SEQ ID NO: 1107 - protein, 118 aa, Artificial Sequence
  source: /note="Description of Artificial Sequence: Synthetic polypeptide"
EVQLVESGGGLVQPGGSLRLSCAASGFTFSSYAMSWVRQAPGKGLEWVSAISGSGGSTYYADSVKGRFTISRDNSKNTLYLQMNSLRAEDTAVYYCAKVEGSGSLDYWGQGTLVTVSS

SEQ ID NO: 1108 - protein, 113 aa, Artificial Sequence
  source: /note="Description of Artificial Sequence: Synthetic polypeptide"
EIVMTQSPGTLSLSPGERATLSCRASQSVSSAYLAWYQQKPGQPPRLLISGASTRATGIPDRFGGSGSGTDFTLTISRLEPEDFAVYYCQHYGSSFNGSSLFTFGQGTRLEIK

SEQ ID NO: 1109 - protein, 490 aa, Artificial Sequence
  source: /note="Description of Artificial Sequence: Synthetic polypeptide"
MALPVTALLLPLALLLHAARPEVQLVESGGGLVQPGGSLRLSCAASGFTFSSYAMSWVRQAPGKGLEWVSAISGSGGSTYYADSVKGRFTISRDNSKNTLYLQMNSLRAEDTAVYYCAKVEGSGSLDYWGQGTLVTVSSGGGGSGGGGSGGGGSEIVMTQSPGTLSLSPGERATLSCRASQSVSSAYLAWYQQKPGQPPRLLISGASTRATGIPDRFGGSGSGTDFTLTISRLEPEDFAVYYCQHYGSSFNGSSLFTFGQGTRLEIKTTTPAPRPPTPAPTIASQPLSLRPEACRPAAGGAVHTRGLDFACDIYIWAPLAGTCGVLLLSLVITLYCKRGRKKLLYIFKQPFMRPVQTTQEEDGCSCRFPEEEEGGCELRVKFSRSADAPAYKQGQNQLYNELNLGRREEYDVLDKRRGRDPEMGGKPRRKNPQEGLYNELQKDKMAEAYSEIGMKGERRRGKGHDGLYQGLSTATKDTYDALHMQALPPR

SEQ ID NO: 1110 - DNA, 1470 bp, Artificial Sequence
  source: /note="Description of Artificial Sequence: Synthetic polynucleotide"
atggccctccctgtcaccgccctgctgcttccgctggctcttctgctccacgccgctcggcccgaagtgcagctcgtggagtcaggaggcggcctggtccagccgggagggtcccttagactgtcatgcgccgcaagcggattcactttctcctcctatgccatgagctgggtccgccaagcccccggaaagggactggaatgggtgtccgccatctcggggtctggaggctcaacttactacgctgactccgtgaagggacggttcaccattagccgcgacaactccaagaacaccctctacctccaaatgaactccctgcgggccgaggataccgccgtctactactgcgccaaagtggaaggttcaggatcgctggactactggggacagggtactctcgtgaccgtgtcatcgggcggaggaggttccggcggtggcggctccggcggcggagggtcggagatcgtgatgacccagagccctggtactctgagcctttcgccgggagaaagggccaccctgtcctgccgcgcttcccaatccgtgtcctccgcgtacttggcgtggtaccagcagaagccgggacagccccctcggctgctgatcagcggggccagcacccgggcaaccggaatcccagacagattcgggggttccggcagcggcacagatttcaccctgactatttcgaggttggagcccgaggactttgcggtgtattactgtcagcactacgggtcgtcctttaatggctccagcctgttcacgttcggacaggggacccgcctggaaatcaagaccactaccccagcaccgaggccacccaccccggctcctaccatcgcctcccagcctctgtccctgcgtccggaggcatgtagacccgcagctggtggggccgtgcatacccggggtcttgacttcgcctgcgatatctacatttgggcccctctggctggtacttgcggggtcctgctgctttcactcgtgatcactctttactgtaagcgcggtcggaagaagctgctgtacatctttaagcaacccttcatgaggcctgtgcagactactcaagaggaggacggctgttcatgccggttcccagaggaggaggaaggcggctgcgaactgcgcgtgaaattcagccgcagcgcagatgctccagcctacaagcaggggcagaaccagctctacaacgaactcaatcttggtcggagagaggagtacgacgtgctggacaagcggagaggacgggacccagaaatgggcgggaagccgcgcagaaagaatccccaagagggcctgtacaacgagctccaaaaggataagatggcagaagcctatagcgagattggtatgaaaggggaacgcagaagaggcaaaggccacgacggactgtaccagggactcagcaccgccaccaaggacacctatgacgctcttcacatgcaggccctgccgcctcgg

SEQ ID NO: 1111 - protein, 241 aa, Artificial Sequence
  source: /note="Description of Artificial Sequence: Synthetic polypeptide"
EVQLVETGGGLVQPGGSLRLSCAASGITFSRYPMSWVRQAPGKGLEWVSGISDSGVSTYYADSAKGRFTISRDNSKNTLFLQMSSLRDEDTAVYYCVTRAGSEASDIWGQGTMVTVSSGGGGSGGGGSGGGGSEIVLTQSPATLSLSPGERATLSCRASQSVSNSLAWYQQKPGQAPRLLIYDASSRATGIPDRFSGSGSGTDFTLTISRLEPEDFAIYYCQQFGTSSGLTFGGGTKLEIK

SEQ ID NO: 1112 - DNA, 723 bp, Artificial Sequence
  source: /note="Description of Artificial Sequence: Synthetic polynucleotide"
gaagtgcaactggtggaaaccggtggcggcctggtgcagcctggaggatcattgaggctgtcatgcgcggccagcggtattaccttctcccggtaccccatgtcctgggtcagacaggccccggggaaagggcttgaatgggtgtccgggatctcggactccggtgtcagcacttactacgccgactccgccaagggacgcttcaccatttcccgggacaactcgaagaacaccctgttcctccaaatgagctccctccgggacgaggatactgcagtgtactactgcgtgacccgcgccgggtccgaggcgtctgacatttggggacagggcactatggtcaccgtgtcgtccggcggagggggctcgggaggcggtggcagcggaggaggagggtccgagatcgtgctgacccaatccccggccaccctctcgctgagccctggagaaagggcaaccttgtcctgtcgcgcgagccagtccgtgagcaactccctggcctggtaccagcagaagcccggacaggctccgagacttctgatctacgacgcttcgagccgggccactggaatccccgaccgcttttcggggtccggctcaggaaccgatttcaccctgacaatctcacggctggagccagaggatttcgccatctattactgccagcagttcggtacttcctccggcctgactttcggaggcggcacgaagctcgaaatcaag

SEQ ID NO: 1113 - protein, 118 aa, Artificial Sequence
  source: /note="Description of Artificial Sequence: Synthetic polypeptide"
EVQLVETGGGLVQPGGSLRLSCAASGITFSRYPMSWVRQAPGKGLEWVSGISDSGVSTYYADSAKGRFTISRDNSKNTLFLQMSSLRDEDTAVYYCVTRAGSEASDIWGQGTMVTVSS

SEQ ID NO: 1114 - protein, 108 aa, Artificial Sequence
  source: /note="Description of Artificial Sequence: Synthetic polypeptide"
EIVLTQSPATLSLSPGERATLSCRASQSVSNSLAWYQQKPGQAPRLLIYDASSRATGIPDRFSGSGSGTDFTLTISRLEPEDFAIYYCQQFGTSSGLTFGGGTKLEIK

SEQ ID NO: 1115 - protein, 485 aa, Artificial Sequence
  source: /note="Description of Artificial Sequence: Synthetic polypeptide"
MALPVTALLLPLALLLHAARPEVQLVETGGGLVQPGGSLRLSCAASGITFSRYPMSWVRQAPGKGLEWVSGISDSGVSTYYADSAKGRFTISRDNSKNTLFLQMSSLRDEDTAVYYCVTRAGSEASDIWGQGTMVTVSSGGGGSGGGGSGGGGSEIVLTQSPATLSLSPGERATLSCRASQSVSNSLAWYQQKPGQAPRLLIYDASSRATGIPDRFSGSGSGTDFTLTISRLEPEDFAIYYCQQFGTSSGLTFGGGTKLEIKTTTPAPRPPTPAPTIASQPLSLRPEACRPAAGGAVHTRGLDFACDIYIWAPLAGTCGVLLLSLVITLYCKRGRKKLLYIFKQPFMRPVQTTQEEDGCSCRFPEEEEGGCELRVKFSRSADAPAYKQGQNQLYNELNLGRREEYDVLDKRRGRDPEMGGKPRRKNPQEGLYNELQKDKMAEAYSEIGMKGERRRGKGHDGLYQGLSTATKDTYDALHMQALPPR

SEQ ID NO: 1116 - DNA, 1455 bp, Artificial Sequence
  source: /note="Description of Artificial Sequence: Synthetic polynucleotide"
atggccctccctgtcaccgccctgctgcttccgctggctcttctgctccacgccgctcggcccgaagtgcaactggtggaaaccggtggcggcctggtgcagcctggaggatcattgaggctgtcatgcgcggccagcggtattaccttctcccggtaccccatgtcctgggtcagacaggccccggggaaagggcttgaatgggtgtccgggatctcggactccggtgtcagcacttactacgccgactccgccaagggacgcttcaccatttcccgggacaactcgaagaacaccctgttcctccaaatgagctccctccgggacgaggatactgcagtgtactactgcgtgacccgcgccgggtccgaggcgtctgacatttggggacagggcactatggtcaccgtgtcgtccggcggagggggctcgggaggcggtggcagcggaggaggagggtccgagatcgtgctgacccaatccccggccaccctctcgctgagccctggagaaagggcaaccttgtcctgtcgcgcgagccagtccgtgagcaactccctggcctggtaccagcagaagcccggacaggctccgagacttctgatctacgacgcttcgagccgggccactggaatccccgaccgcttttcggggtccggctcaggaaccgatttcaccctgacaatctcacggctggagccagaggatttcgccatctattactgccagcagttcggtacttcctccggcctgactttcggaggcggcacgaagctcgaaatcaagaccactaccccagcaccgaggccacccaccccggctcctaccatcgcctcccagcctctgtccctgcgtccggaggcatgtagacccgcagctggtggggccgtgcatacccggggtcttgacttcgcctgcgatatctacatttgggcccctctggctggtacttgcggggtcctgctgctttcactcgtgatcactctttactgtaagcgcggtcggaagaagctgctgtacatctttaagcaacccttcatgaggcctgtgcagactactcaagaggaggacggctgttcatgccggttcccagaggaggaggaaggcggctgcgaactgcgcgtgaaattcagccgcagcgcagatgctccagcctacaagcaggggcagaaccagctctacaacgaactcaatcttggtcggagagaggagtacgacgtgctggacaagcggagaggacgggacccagaaatgggcgggaagccgcgcagaaagaatccccaagagggcctgtacaacgagctccaaaaggataagatggcagaagcctatagcgagattggtatgaaaggggaacgcagaagaggcaaaggccacgacggactgtaccagggactcagcaccgccaccaaggacacctatgacgctcttcacatgcaggccctgccgcctcgg

SEQ ID NO: 1117 - protein, 248 aa, Artificial Sequence
  source: /note="Description of Artificial Sequence: Synthetic polypeptide"
QVQLVESGGGLVQPGGSLRLSCAASGFTFSSYAMSWVRQAPGKGLEWVSAISGSGGSTYYADSVKGRFTISRDNAKNSLYLQMNSLRAEDTAIYYCARATYKRELRYYYGMDVWGQGTMVTVSSGGGGSGGGGSGGGGSEIVMTQSPGTVSLSPGERATLSCRASQSVSSSFLAWYQQKPGQAPRLLIYGASSRATGIPDRFSGSGSGTDFTLTISRLEPEDSAVYYCQQYHSSPSWTFGQGTRLEIK

SEQ ID NO: 1118 - DNA, 744 bp, Artificial Sequence
  source: /note="Description of Artificial Sequence: Synthetic polynucleotide"
caagtgcagctcgtggaatcgggtggcggactggtgcagccggggggctcacttagactgtcctgcgcggccagcggattcactttctcctcctacgccatgtcctgggtcagacaggcccctggaaagggcctggaatgggtgtccgcaatcagcggcagcggcggctcgacctattacgcggattcagtgaagggcagattcaccatttcccgggacaacgccaagaactccttgtaccttcaaatgaactccctccgcgcggaagataccgcaatctactactgcgctcgggccacttacaagagggaactgcgctactactacgggatggacgtctggggccagggaaccatggtcaccgtgtccagcggaggaggaggatcgggaggaggcggtagcgggggtggagggtcggagatcgtgatgacccagtcccccggcactgtgtcgctgtcccccggcgaacgggccaccctgtcatgtcgggccagccagtcagtgtcgtcaagcttcctcgcctggtaccagcagaaaccgggacaagctccccgcctgctgatctacggagccagcagccgggccaccggtattcctgaccggttctccggttcggggtccgggaccgactttactctgactatctctcgcctcgagccagaggactccgccgtgtattactgccagcagtaccactcctccccgtcctggacgttcggacagggcacaaggctggagattaag

SEQ ID NO: 1119 - protein, 124 aa, Artificial Sequence
  source: /note="Description of Artificial Sequence: Synthetic polypeptide"
QVQLVESGGGLVQPGGSLRLSCAASGFTFSSYAMSWVRQAPGKGLEWVSAISGSGGSTYYADSVKGRFTISRDNAKNSLYLQMNSLRAEDTAIYYCARATYKRELRYYYGMDVWGQGTMVTVSS

SEQ ID NO: 1120 - protein, 109 aa, Artificial Sequence
  source: /note="Description of Artificial Sequence: Synthetic polypeptide"
EIVMTQSPGTVSLSPGERATLSCRASQSVSSSFLAWYQQKPGQAPRLLIYGASSRATGIPDRFSGSGSGTDFTLTISRLEPEDSAVYYCQQYHSSPSWTFGQGTRLEIK

SEQ ID NO: 1121 - protein, 492 aa, Artificial Sequence
  source: /note="Description of Artificial Sequence: Synthetic polypeptide"
MALPVTALLLPLALLLHAARPQVQLVESGGGLVQPGGSLRLSCAASGFTFSSYAMSWVRQAPGKGLEWVSAISGSGGSTYYADSVKGRFTISRDNAKNSLYLQMNSLRAEDTAIYYCARATYKRELRYYYGMDVWGQGTMVTVSSGGGGSGGGGSGGGGSEIVMTQSPGTVSLSPGERATLSCRASQSVSSSFLAWYQQKPGQAPRLLIYGASSRATGIPDRFSGSGSGTDFTLTISRLEPEDSAVYYCQQYHSSPSWTFGQGTRLEIKTTTPAPRPPTPAPTIASQPLSLRPEACRPAAGGAVHTRGLDFACDIYIWAPLAGTCGVLLLSLVITLYCKRGRKKLLYIFKQPFMRPVQTTQEEDGCSCRFPEEEEGGCELRVKFSRSADAPAYKQGQNQLYNELNLGRREEYDVLDKRRGRDPEMGGKPRRKNPQEGLYNELQKDKMAEAYSEIGMKGERRRGKGHDGLYQGLSTATKDTYDALHMQALPPR

SEQ ID NO: 1122 - DNA, 1476 bp, Artificial Sequence
  source: /note="Description of Artificial Sequence: Synthetic polynucleotide"
atggccctccctgtcaccgccctgctgcttccgctggctcttctgctccacgccgctcggccccaagtgcagctcgtggaatcgggtggcggactggtgcagccggggggctcacttagactgtcctgcgcggccagcggattcactttctcctcctacgccatgtcctgggtcagacaggcccctggaaagggcctggaatgggtgtccgcaatcagcggcagcggcggctcgacctattacgcggattcagtgaagggcagattcaccatttcccgggacaacgccaagaactccttgtaccttcaaatgaactccctccgcgcggaagataccgcaatctactactgcgctcgggccacttacaagagggaactgcgctactactacgggatggacgtctggggccagggaaccatggtcaccgtgtccagcggaggaggaggatcgggaggaggcggtagcgggggtggagggtcggagatcgtgatgacccagtcccccggcactgtgtcgctgtcccccggcgaacgggccaccctgtcatgtcgggccagccagtcagtgtcgtcaagcttcctcgcctggtaccagcagaaaccgggacaagctccccgcctgctgatctacggagccagcagccgggccaccggtattcctgaccggttctccggttcggggtccgggaccgactttactctgactatctctcgcctcgagccagaggactccgccgtgtattactgccagcagtaccactcctccccgtcctggacgttcggacagggcacaaggctggagattaagaccactaccccagcaccgaggccacccaccccggctcctaccatcgcctcccagcctctgtccctgcgtccggaggcatgtagacccgcagctggtggggccgtgcatacccggggtcttgacttcgcctgcgatatctacatttgggcccctctggctggtacttgcggggtcctgctgctttcactcgtgatcactctttactgtaagcgcggtcggaagaagctgctgtacatctttaagcaacccttcatgaggcctgtgcagactactcaagaggaggacggctgttcatgccggttcccagaggaggaggaaggcggctgcgaactgcgcgtgaaattcagccgcagcgcagatgctccagcctacaagcaggggcagaaccagctctacaacgaactcaatcttggtcggagagaggagtacgacgtgctggacaagcggagaggacgggacccagaaatgggcgggaagccgcgcagaaagaatccccaagagggcctgtacaacgagctccaaaaggataagatggcagaagcctatagcgagattggtatgaaaggggaacgcagaagaggcaaaggccacgacggactgtaccagggactcagcaccgccaccaaggacacctatgacgctcttcacatgcaggccctgccgcctcgg

SEQ ID NO: 1123 - protein, 248 aa, Artificial Sequence
  source: /note="Description of Artificial Sequence: Synthetic polypeptide"
EVQLVETGGGLVQPGGSLRLSCAASGFTFSSYAMSWVRQAPGKGLEWVSAISGSGGSTYYADSVKGRFTISRDNSKNTLYLQMNTLKAEDTAVYYCARATYKRELRYYYGMDVWGQGTTVTVSSGGGGSGGGGSGGGGSEIVLTQSPSTLSLSPGESATLSCRASQSVSTTFLAWYQQKPGQAPRLLIYGSSNRATGIPDRFSGSGSGTDFTLTIRRLEPEDFAVYYCQQYHSSPSWTFGQGTKVEIK

SEQ ID NO: 1124 - DNA, 744 bp, Artificial Sequence
  source: /note="Description of Artificial Sequence: Synthetic polynucleotide"
gaggtgcagcttgtggaaaccggtggcggactggtgcagcccggaggaagcctcaggctgtcctgcgccgcgtccggcttcaccttctcctcgtacgccatgtcctgggtccgccaggcccccggaaagggcctggaatgggtgtccgccatctctggaagcggaggttccacgtactacgcggacagcgtcaagggaaggttcacaatctcccgcgataattcgaagaacactctgtaccttcaaatgaacaccctgaaggccgaggacactgctgtgtactactgcgcacgggccacctacaagagagagctccggtactactacggaatggacgtctggggccagggaactactgtgaccgtgtcctcgggagggggtggctccggggggggcggctccggcggaggcggttccgagattgtgctgacccagtcaccttcaactctgtcgctgtccccgggagagagcgctactctgagctgccgggccagccagtccgtgtccaccaccttcctcgcctggtatcagcagaagccggggcaggcaccacggctcttgatctacgggtcaagcaacagagcgaccggaattcctgaccgcttctcggggagcggttcaggcaccgacttcaccctgactatccggcgcctggaacccgaagatttcgccgtgtattactgtcaacagtaccactcctcgccgtcctggacctttggccaaggaaccaaagtggaaatcaag

SEQ ID NO: 1125 - protein, 124 aa, Artificial Sequence
  source: /note="Description of Artificial Sequence: Synthetic polypeptide"
EVQLVETGGGLVQPGGSLRLSCAASGFTFSSYAMSWVRQAPGKGLEWVSAISGSGGSTYYADSVKGRFTISRDNSKNTLYLQMNTLKAEDTAVYYCARATYKRELRYYYGMDVWGQGTTVTVSS

SEQ ID NO: 1126 - protein, 109 aa, Artificial Sequence
  source: /note="Description of Artificial Sequence: Synthetic polypeptide"
EIVLTQSPSTLSLSPGESATLSCRASQSVSTTFLAWYQQKPGQAPRLLIYGSSNRATGIPDRFSGSGSGTDFTLTIRRLEPEDFAVYYCQQYHSSPSWTFGQGTKVEIK

SEQ ID NO: 1127 - protein, 492 aa, Artificial Sequence
  source: /note="Description of Artificial Sequence: Synthetic polypeptide"
MALPVTALLLPLALLLHAARPEVQLVETGGGLVQPGGSLRLSCAASGFTFSSYAMSWVRQAPGKGLEWVSAISGSGGSTYYADSVKGRFTISRDNSKNTLYLQMNTLKAEDTAVYYCARATYKRELRYYYGMDVWGQGTTVTVSSGGGGSGGGGSGGGGSEIVLTQSPSTLSLSPGESATLSCRASQSVSTTFLAWYQQKPGQAPRLLIYGSSNRATGIPDRFSGSGSGTDFTLTIRRLEPEDFAVYYCQQYHSSPSWTFGQGTKVEIKTTTPAPRPPTPAPTIASQPLSLRPEACRPAAGGAVHTRGLDFACDIYIWAPLAGTCGVLLLSLVITLYCKRGRKKLLYIFKQPFMRPVQTTQEEDGCSCRFPEEEEGGCELRVKFSRSADAPAYKQGQNQLYNELNLGRREEYDVLDKRRGRDPEMGGKPRRKNPQEGLYNELQKDKMAEAYSEIGMKGERRRGKGHDGLYQGLSTATKDTYDALHMQALPPR

SEQ ID NO: 1128 - DNA, 1476 bp, Artificial Sequence
  source: /note="Description of Artificial Sequence: Synthetic polynucleotide"
atggccctccctgtcaccgccctgctgcttccgctggctcttctgctccacgccgctcggcccgaggtgcagcttgtggaaaccggtggcggactggtgcagcccggaggaagcctcaggctgtcctgcgccgcgtccggcttcaccttctcctcgtacgccatgtcctgggtccgccaggcccccggaaagggcctggaatgggtgtccgccatctctggaagcggaggttccacgtactacgcggacagcgtcaagggaaggttcacaatctcccgcgataattcgaagaacactctgtaccttcaaatgaacaccctgaaggccgaggacactgctgtgtactactgcgcacgggccacctacaagagagagctccggtactactacggaatggacgtctggggccagggaactactgtgaccgtgtcctcgggagggggtggctccggggggggcggctccggcggaggcggttccgagattgtgctgacccagtcaccttcaactctgtcgctgtccccgggagagagcgctactctgagctgccgggccagccagtccgtgtccaccaccttcctcgcctggtatcagcagaagccggggcaggcaccacggctcttgatctacgggtcaagcaacagagcgaccggaattcctgaccgcttctcggggagcggttcaggcaccgacttcaccctgactatccggcgcctggaacccgaagatttcgccgtgtattactgtcaacagtaccactcctcgccgtcctggacctttggccaaggaaccaaagtggaaatcaagaccactaccccagcaccgaggccacccaccccggctcctaccatcgcctcccagcctctgtccctgcgtccggaggcatgtagacccgcagctggtggggccgtgcatacccggggtcttgacttcgcctgcgatatctacatttgggcccctctggctggtacttgcggggtcctgctgctttcactcgtgatcactctttactgtaagcgcggtcggaagaagctgctgtacatctttaagcaacccttcatgaggcctgtgcagactactcaagaggaggacggctgttcatgccggttcccagaggaggaggaaggcggctgcgaactgcgcgtgaaattcagccgcagcgcagatgctccagcctacaagcaggggcagaaccagctctacaacgaactcaatcttggtcggagagaggagtacgacgtgctggacaagcggagaggacgggacccagaaatgggcgggaagccgcgcagaaagaatccccaagagggcctgtacaacgagctccaaaaggataagatggcagaagcctatagcgagattggtatgaaaggggaacgcagaagaggcaaaggccacgacggactgtaccagggactcagcaccgccaccaaggacacctatgacgctcttcacatgcaggccctgccgcctcgg

SEQ ID NO: 1129 - protein, 239 aa, Artificial Sequence
  source: /note="Description of Artificial Sequence: Synthetic polypeptide"
EVQLVETGGGLVQPGRSLRLSCAASGFTFDDYAMHWVRQAPGKGLEWVSGISWNSGSIGYADSVKGRFTISRDNAKNSLYLQMNSLRDEDTAVYYCARVGKAVPDVWGQGTTVTVSSGGGGSGGGGSGGGGSDIVMTQTPSSLSASVGDRVTITCRASQSISSYLNWYQQKPGKAPKLLIYAASSLQSGVPSRFSGSGSGTDFTLTISSLQPEDFATYYCQQSYSTPYSFGQGTRLEIK

SEQ ID NO: 1130 - DNA, 717 bp, Artificial Sequence
  source: /note="Description of Artificial Sequence: Synthetic polynucleotide"
gaagtgcagctcgtggaaactggaggtggactcgtgcagcctggacggtcgctgcggctgagctgcgctgcatccggcttcaccttcgacgattatgccatgcactgggtcagacaggcgccagggaagggacttgagtgggtgtccggtatcagctggaatagcggctcaatcggatacgcggactccgtgaagggaaggttcaccatttcccgcgacaacgccaagaactccctgtacttgcaaatgaacagcctccgggatgaggacactgccgtgtactactgcgcccgcgtcggaaaagctgtgcccgacgtctggggccagggaaccactgtgaccgtgtccagcggcgggggtggatcgggcggtggagggtccggtggagggggctcagatattgtgatgacccagaccccctcgtccctgtccgcctcggtcggcgaccgcgtgactatcacatgtagagcctcgcagagcatctccagctacctgaactggtatcagcagaagccggggaaggccccgaagctcctgatctacgcggcatcatcactgcaatcgggagtgccgagccggttttccgggtccggctccggcaccgacttcacgctgaccatttcttccctgcaacccgaggacttcgccacttactactgccagcagtcctactccaccccttactccttcggccaaggaaccaggctggaaatcaag

SEQ ID NO: 1131 - protein, 117 aa, Artificial Sequence
  source: /note="Description of Artificial Sequence: Synthetic polypeptide"
EVQLVETGGGLVQPGRSLRLSCAASGFTFDDYAMHWVRQAPGKGLEWVSGISWNSGSIGYADSVKGRFTISRDNAKNSLYLQMNSLRDEDTAVYYCARVGKAVPDVWGQGTTVTVSS

SEQ ID NO: 1132 - protein, 107 aa, Artificial Sequence
  source: /note="Description of Artificial Sequence: Synthetic polypeptide"
DIVMTQTPSSLSASVGDRVTITCRASQSISSYLNWYQQKPGKAPKLLIYAASSLQSGVPSRFSGSGSGTDFTLTISSLQPEDFATYYCQQSYSTPYSFGQGTRLEIK

SEQ ID NO: 1133 - protein, 483 aa, Artificial Sequence
  source: /note="Description of Artificial Sequence: Synthetic polypeptide"
MALPVTALLLPLALLLHAARPEVQLVETGGGLVQPGRSLRLSCAASGFTFDDYAMHWVRQAPGKGLEWVSGISWNSGSIGYADSVKGRFTISRDNAKNSLYLQMNSLRDEDTAVYYCARVGKAVPDVWGQGTTVTVSSGGGGSGGGGSGGGGSDIVMTQTPSSLSASVGDRVTITCRASQSISSYLNWYQQKPGKAPKLLIYAASSLQSGVPSRFSGSGSGTDFTLTISSLQPEDFATYYCQQSYSTPYSFGQGTRLEIKTTTPAPRPPTPAPTIASQPLSLRPEACRPAAGGAVHTRGLDFACDIYIWAPLAGTCGVLLLSLVITLYCKRGRKKLLYIFKQPFMRPVQTTQEEDGCSCRFPEEEEGGCELRVKFSRSADAPAYKQGQNQLYNELNLGRREEYDVLDKRRGRDPEMGGKPRRKNPQEGLYNELQKDKMAEAYSEIGMKGERRRGKGHDGLYQGLSTATKDTYDALHMQALPPR

SEQ ID NO: 1134 - DNA, 1449 bp, Artificial Sequence
  source: /note="Description of Artificial Sequence: Synthetic polynucleotide"
atggccctccctgtcaccgccctgctgcttccgctggctcttctgctccacgccgctcggcccgaagtgcagctcgtggaaactggaggtggactcgtgcagcctggacggtcgctgcggctgagctgcgctgcatccggcttcaccttcgacgattatgccatgcactgggtcagacaggcgccagggaagggacttgagtgggtgtccggtatcagctggaatagcggctcaatcggatacgcggactccgtgaagggaaggttcaccatttcccgcgacaacgccaagaactccctgtacttgcaaatgaacagcctccgggatgaggacactgccgtgtactactgcgcccgcgtcggaaaagctgtgcccgacgtctggggccagggaaccactgtgaccgtgtccagcggcgggggtggatcgggcggtggagggtccggtggagggggctcagatattgtgatgacccagaccccctcgtccctgtccgcctcggtcggcgaccgcgtgactatcacatgtagagcctcgcagagcatctccagctacctgaactggtatcagcagaagccggggaaggccccgaagctcctgatctacgcggcatcatcactgcaatcgggagtgccgagccggttttccgggtccggctccggcaccgacttcacgctgaccatttcttccctgcaacccgaggacttcgccacttactactgccagcagtcctactccaccccttactccttcggccaaggaaccaggctggaaatcaagaccactaccccagcaccgaggccacccaccccggctcctaccatcgcctcccagcctctgtccctgcgtccggaggcatgtagacccgcagctggtggggccgtgcatacccggggtcttgacttcgcctgcgatatctacatttgggcccctctggctggtacttgcggggtcctgctgctttcactcgtgatcactctttactgtaagcgcggtcggaagaagctgctgtacatctttaagcaacccttcatgaggcctgtgcagactactcaagaggaggacggctgttcatgccggttcccagaggaggaggaaggcggctgcgaactgcgcgtgaaattcagccgcagcgcagatgctccagcctacaagcaggggcagaaccagctctacaacgaactcaatcttggtcggagagaggagtacgacgtgctggacaagcggagaggacgggacccagaaatgggcgggaagccgcgcagaaagaatccccaagagggcctgtacaacgagctccaaaaggataagatggcagaagcctatagcgagattggtatgaaaggggaacgcagaagaggcaaaggccacgacggactgtaccagggactcagcaccgccaccaaggacacctatgacgctcttcacatgcaggccctgccgcctcgg

SEQ ID NO: 1135 - protein, 246 aa, Artificial Sequence
  source: /note="Description of Artificial Sequence: Synthetic polypeptide"
EVQLVESGGGLVQPGRSLRLSCTASGFTFDDYAMHWVRQRPGKGLEWVASINWKGNSLAYGDSVKGRFAISRDNAKNTVFLQMNSLRTEDTAVYYCASHQGVAYYNYAMDVWGRGTLVTVSSGGGGSGGGGSGGGGSEIVLTQSPGTLSLSPGERATLSCRATQSIGSSFLAWYQQRPGQAPRLLIYGASQRATGIPDRFSGRGSGTDFTLTISRVEPEDSAVYYCQHYESSPSWTFGQGTKVEIK

SEQ ID NO: 1136 - DNA, 738 bp, Artificial Sequence
  source: /note="Description of Artificial Sequence: Synthetic polynucleotide"
gaagtgcagctcgtggagagcgggggaggattggtgcagcccggaaggtccctgcggctctcctgcactgcgtctggcttcaccttcgacgactacgcgatgcactgggtcagacagcgcccgggaaagggcctggaatgggtcgcctcaatcaactggaagggaaactccctggcctatggcgacagcgtgaagggccgcttcgccatttcgcgcgacaacgccaagaacaccgtgtttctgcaaatgaattccctgcggaccgaggataccgctgtgtactactgcgccagccaccagggcgtggcatactataactacgccatggacgtgtggggaagagggacgctcgtcaccgtgtcctccgggggcggtggatcgggtggaggaggaagcggtggcgggggcagcgaaatcgtgctgactcagagcccgggaactctttcactgtccccgggagaacgggccactctctcgtgccgggccacccagtccatcggctcctccttccttgcctggtaccagcagaggccaggacaggcgccccgcctgctgatctacggtgcttcccaacgcgccactggcattcctgaccggttcagcggcagagggtcgggaaccgatttcacactgaccatttcccgggtggagcccgaagattcggcagtctactactgtcagcattacgagtcctccccttcatggaccttcggtcaagggaccaaagtggagatcaag

SEQ ID NO: 1137 - protein, 122 aa, Artificial Sequence
  source: /note="Description of Artificial Sequence: Synthetic polypeptide"
EVQLVESGGGLVQPGRSLRLSCTASGFTFDDYAMHWVRQRPGKGLEWVASINWKGNSLAYGDSVKGRFAISRDNAKNTVFLQMNSLRTEDTAVYYCASHQGVAYYNYAMDVWGRGTLVTVSS

SEQ ID NO: 1138 - protein, 109 aa, Artificial Sequence
  source: /note="Description of Artificial Sequence: Synthetic polypeptide"
EIVLTQSPGTLSLSPGERATLSCRATQSIGSSFLAWYQQRPGQAPRLLIYGASQRATGIPDRFSGRGSGTDFTLTISRVEPEDSAVYYCQHYESSPSWTFGQGTKVEIK

SEQ ID NO: 1139 - protein, 490 aa, Artificial Sequence
  source: /note="Description of Artificial Sequence: Synthetic polypeptide"
MALPVTALLLPLALLLHAARPEVQLVESGGGLVQPGRSLRLSCTASGFTFDDYAMHWVRQRPGKGLEWVASINWKGNSLAYGDSVKGRFAISRDNAKNTVFLQMNSLRTEDTAVYYCASHQGVAYYNYAMDVWGRGTLVTVSSGGGGSGGGGSGGGGSEIVLTQSPGTLSLSPGERATLSCRATQSIGSSFLAWYQQRPGQAPRLLIYGASQRATGIPDRFSGRGSGTDFTLTISRVEPEDSAVYYCQHYESSPSWTFGQGTKVEIKTTTPAPRPPTPAPTIASQPLSLRPEACRPAAGGAVHTRGLDFACDIYIWAPLAGTCGVLLLSLVITLYCKRGRKKLLYIFKQPFMRPVQTTQEEDGCSCRFPEEEEGGCELRVKFSRSADAPAYKQGQNQLYNELNLGRREEYDVLDKRRGRDPEMGGKPRRKNPQEGLYNELQKDKMAEAYSEIGMKGERRRGKGHDGLYQGLSTATKDTYDALHMQALPPR

SEQ ID NO: 1140 - DNA, 1470 bp, Artificial Sequence
  source: /note="Description of Artificial Sequence: Synthetic polynucleotide"
atggccctccctgtcaccgccctgctgcttccgctggctcttctgctccacgccgctcggcccgaagtgcagctcgtggagagcgggggaggattggtgcagcccggaaggtccctgcggctctcctgcactgcgtctggcttcaccttcgacgactacgcgatgcactgggtcagacagcgcccgggaaagggcctggaatgggtcgcctcaatcaactggaagggaaactccctggcctatggcgacagcgtgaagggccgcttcgccatttcgcgcgacaacgccaagaacaccgtgtttctgcaaatgaattccctgcggaccgaggataccgctgtgtactactgcgccagccaccagggcgtggcatactataactacgccatggacgtgtggggaagagggacgctcgtcaccgtgtcctccgggggcggtggatcgggtggaggaggaagcggtggcgggggcagcgaaatcgtgctgactcagagcccgggaactctttcactgtccccgggagaacgggccactctctcgtgccgggccacccagtccatcggctcctccttccttgcctggtaccagcagaggccaggacaggcgccccgcctgctgatctacggtgcttcccaacgcgccactggcattcctgaccggttcagcggcagagggtcgggaaccgatttcacactgaccatttcccgggtggagcccgaagattcggcagtctactactgtcagcattacgagtcctccccttcatggaccttcggtcaagggaccaaagtggagatcaagaccactaccccagcaccgaggccacccaccccggctcctaccatcgcctcccagcctctgtccctgcgtccggaggcatgtagacccgcagctggtggggccgtgcatacccggggtcttgacttcgcctgcgatatctacatttgggcccctctggctggtacttgcggggtcctgctgctttcactcgtgatcactctttactgtaagcgcggtcggaagaagctgctgtacatctttaagcaacccttcatgaggcctgtgcagactactcaagaggaggacggctgttcatgccggttcccagaggaggaggaaggcggctgcgaactgcgcgtgaaattcagccgcagcgcagatgctccagcctacaagcaggggcagaaccagctctacaacgaactcaatcttggtcggagagaggagtacgacgtgctggacaagcggagaggacgggacccagaaatgggcgggaagccgcgcagaaagaatccccaagagggcctgtacaacgagctccaaaaggataagatggcagaagcctatagcgagattggtatgaaaggggaacgcagaagaggcaaaggccacgacggactgtaccagggactcagcaccgccaccaaggacacctatgacgctcttcacatgcaggccctgccgcctcgg

SEQ ID NO: 1141 - protein, 241 aa, Artificial Sequence
  source: /note="Description of Artificial Sequence: Synthetic polypeptide"
EVQLVESGGGLVQPGGSLRLSCAASGFTFSSYAMSWVRQAPGKGLEWVSAISGSGGSTYYADSVKGRFTISRDNSKNTLYLQMNSLRAEDTAVYYCAKVVRDGMDVWGQGTTVTVSSGGGGSGGGGSGGGGSEIVLTQSPATLSLSPGERATLSCRASQSVSSSYLAWYQQKPGQAPRLLIYGASSRATGIPDRFSGNGSGTDFTLTISRLEPEDFAVYYCQQYGSPPRFTFGPGTKVDIK

SEQ ID NO: 1142 - DNA, 723 bp, Artificial Sequence
  source: /note="Description of Artificial Sequence: Synthetic polynucleotide"
gaggtgcagttggtcgaaagcgggggcgggcttgtgcagcctggcggatcactgcggctgtcctgcgcggcatcaggcttcacgttttcttcctacgccatgtcctgggtgcgccaggcccctggaaagggactggaatgggtgtccgcgatttcggggtccggcgggagcacctactacgccgattccgtgaagggccgcttcactatctcgcgggacaactccaagaacaccctctacctccaaatgaatagcctgcgggccgaggataccgccgtctactattgcgctaaggtcgtgcgcgacggaatggacgtgtggggacagggtaccaccgtgacagtgtcctcggggggaggcggtagcggcggaggaggaagcggtggtggaggttccgagattgtgctgactcaatcacccgcgaccctgagcctgtcccccggcgaaagggccactctgtcctgtcgggccagccaatcagtctcctcctcgtacctggcctggtaccagcagaagccaggacaggctccgagactccttatctatggcgcatcctcccgcgccaccggaatcccggataggttctcgggaaacggatcggggaccgacttcactctcaccatctcccggctggaaccggaggacttcgccgtgtactactgccagcagtacggcagcccgcctagattcactttcggccccggcaccaaagtggacatcaag

SEQ ID NO: 1143 - protein, 117 aa, Artificial Sequence
  source: /note="Description of Artificial Sequence: Synthetic polypeptide"
EVQLVESGGGLVQPGGSLRLSCAASGFTFSSYAMSWVRQAPGKGLEWVSAISGSGGSTYYADSVKGRFTISRDNSKNTLYLQMNSLRAEDTAVYYCAKVVRDGMDVWGQGTTVTVSS

SEQ ID NO: 1144 - protein, 109 aa, Artificial Sequence
  source: /note="Description of Artificial Sequence: Synthetic polypeptide"
EIVLTQSPATLSLSPGERATLSCRASQSVSSSYLAWYQQKPGQAPRLLIYGASSRATGIPDRFSGNGSGTDFTLTISRLEPEDFAVYYCQQYGSPPRFTFGPGTKVDIK

SEQ ID NO: 1145 - protein, 485 aa, Artificial Sequence
  source: /note="Description of Artificial Sequence: Synthetic polypeptide"
MALPVTALLLPLALLLHAARPEVQLVESGGGLVQPGGSLRLSCAASGFTFSSYAMSWVRQAPGKGLEWVSAISGSGGSTYYADSVKGRFTISRDNSKNTLYLQMNSLRAEDTAVYYCAKVVRDGMDVWGQGTTVTVSSGGGGSGGGGSGGGGSEIVLTQSPATLSLSPGERATLSCRASQSVSSSYLAWYQQKPGQAPRLLIYGASSRATGIPDRFSGNGSGTDFTLTISRLEPEDFAVYYCQQYGSPPRFTFGPGTKVDIKTTTPAPRPPTPAPTIASQPLSLRPEACRPAAGGAVHTRGLDFACDIYIWAPLAGTCGVLLLSLVITLYCKRGRKKLLYIFKQPFMRPVQTTQEEDGCSCRFPEEEEGGCELRVKFSRSADAPAYKQGQNQLYNELNLGRREEYDVLDKRRGRDPEMGGKPRRKNPQEGLYNELQKDKMAEAYSEIGMKGERRRGKGHDGLYQGLSTATKDTYDALHMQALPPR

SEQ ID NO: 1146 - DNA, 1455 bp, Artificial Sequence
  source: /note="Description of Artificial Sequence: Synthetic polynucleotide"
atggccctccctgtcaccgccctgctgcttccgctggctcttctgctccacgccgctcggcccgaggtgcagttggtcgaaagcgggggcgggcttgtgcagcctggcggatcactgcggctgtcctgcgcggcatcaggcttcacgttttcttcctacgccatgtcctgggtgcgccaggcccctggaaagggactggaatgggtgtccgcgatttcggggtccggcgggagcacctactacgccgattccgtgaagggccgcttcactatctcgcgggacaactccaagaacaccctctacctccaaatgaatagcctgcgggccgaggataccgccgtctactattgcgctaaggtcgtgcgcgacggaatggacgtgtggggacagggtaccaccgtgacagtgtcctcggggggaggcggtagcggcggaggaggaagcggtggtggaggttccgagattgtgctgactcaatcacccgcgaccctgagcctgtcccccggcgaaagggccactctgtcctgtcgggccagccaatcagtctcctcctcgtacctggcctggtaccagcagaagccaggacaggctccgagactccttatctatggcgcatcctcccgcgccaccggaatcccggataggttctcgggaaacggatcggggaccgacttcactctcaccatctcccggctggaaccggaggacttcgccgtgtactactgccagcagtacggcagcccgcctagattcactttcggccccggcaccaaagtggacatcaagaccactaccccagcaccgaggccacccaccccggctcctaccatcgcctcccagcctctgtccctgcgtccggaggcatgtagacccgcagctggtggggccgtgcatacccggggtcttgacttcgcctgcgatatctacatttgggcccctctggctggtacttgcggggtcctgctgctttcactcgtgatcactctttactgtaagcgcggtcggaagaagctgctgtacatctttaagcaacccttcatgaggcctgtgcagactactcaagaggaggacggctgttcatgccggttcccagaggaggaggaaggcggctgcgaactgcgcgtgaaattcagccgcagcgcagatgctccagcctacaagcaggggcagaaccagctctacaacgaactcaatcttggtcggagagaggagtacgacgtgctggacaagcggagaggacgggacccagaaatgggcgggaagccgcgcagaaagaatccccaagagggcctgtacaacgagctccaaaaggataagatggcagaagcctatagcgagattggtatgaaaggggaacgcagaagaggcaaaggccacgacggactgtaccagggactcagcaccgccaccaaggacacctatgacgctcttcacatgcaggccctgccgcctcgg

SEQ ID NO: 1147 - protein, 242 aa, Artificial Sequence
  source: /note="Description of Artificial Sequence: Synthetic polypeptide"
EVQLLESGGGLVQPGGSLRLSCAASGFTFSSYAMSWVRQAPGKGLEWVSAISGSGGSTYYADSVKGRFTISRDNSKNTLYLQMNSLRAEDTAVYYCAKIPQTGTFDYWGQGTLVTVSSGGGGSGGGGSGGGGSEIVLTQSPGTLSLSPGERATLSCRASQSVSSSYLAWYQQRPGQAPRLLIYGASSRATGIPDRFSGSGSGTDFTLTISRLEPEDFAVYYCQHYGSSPSWTFGQGTRLEIK

SEQ ID NO: 1148 - DNA, 726 bp, Artificial Sequence
  source: /note="Description of Artificial Sequence: Synthetic polynucleotide"
gaagtgcagctgctggagtccggcggtggattggtgcaaccggggggatcgctcagactgtcctgtgcggcgtcaggcttcaccttctcgagctacgccatgtcatgggtcagacaggcccctggaaagggtctggaatgggtgtccgccatttccgggagcgggggatctacatactacgccgatagcgtgaagggccgcttcaccatttcccgggacaactccaagaacactctctatctgcaaatgaactccctccgcgctgaggacactgccgtgtactactgcgccaaaatccctcagaccggcaccttcgactactggggacaggggactctggtcaccgtcagcagcggtggcggaggttcggggggaggaggaagcggcggcggagggtccgagattgtgctgacccagtcacccggcactttgtccctgtcgcctggagaaagggccaccctttcctgccgggcatcccaatccgtgtcctcctcgtacctggcctggtaccagcagaggcccggacaggccccacggcttctgatctacggagcaagcagccgcgcgaccggtatcccggaccggttttcgggctcgggctcaggaactgacttcaccctcaccatctcccgcctggaacccgaagatttcgctgtgtattactgccagcactacggcagctccccgtcctggacgttcggccagggaactcggctggagatcaag

SEQ ID NO: 1149 - protein, 118 aa, Artificial Sequence
  source: /note="Description of Artificial Sequence: Synthetic polypeptide"
EVQLLESGGGLVQPGGSLRLSCAASGFTFSSYAMSWVRQAPGKGLEWVSAISGSGGSTYYADSVKGRFTISRDNSKNTLYLQMNSLRAEDTAVYYCAKIPQTGTFDYWGQGTLVTVSS

SEQ ID NO: 1150 - protein, 109 aa, Artificial Sequence
  source: /note="Description of Artificial Sequence: Synthetic polypeptide"
EIVLTQSPGTLSLSPGERATLSCRASQSVSSSYLAWYQQRPGQAPRLLIYGASSRATGIPDRFSGSGSGTDFTLTISRLEPEDFAVYYCQHYGSSPSWTFGQGTRLEIK

SEQ ID NO: 1151 - protein, 486 aa, Artificial Sequence
  source: /note="Description of Artificial Sequence: Synthetic polypeptide"
MALPVTALLLPLALLLHAARPEVQLLESGGGLVQPGGSLRLSCAASGFTFSSYAMSWVRQAPGKGLEWVSAISGSGGSTYYADSVKGRFTISRDNSKNTLYLQMNSLRAEDTAVYYCAKIPQTGTFDYWGQGTLVTVSSGGGGSGGGGSGGGGSEIVLTQSPGTLSLSPGERATLSCRASQSVSSSYLAWYQQRPGQAPRLLIYGASSRATGIPDRFSGSGSGTDFTLTISRLEPEDFAVYYCQHYGSSPSWTFGQGTRLEIKTTTPAPRPPTPAPTIASQPLSLRPEACRPAAGGAVHTRGLDFACDIYIWAPLAGTCGVLLLSLVITLYCKRGRKKLLYIFKQPFMRPVQTTQEEDGCSCRFPEEEEGGCELRVKFSRSADAPAYKQGQNQLYNELNLGRREEYDVLDKRRGRDPEMGGKPRRKNPQEGLYNELQKDKMAEAYSEIGMKGERRRGKGHDGLYQGLSTATKDTYDALHMQALPPR

SEQ ID NO: 1152 - DNA, 1458 bp, Artificial Sequence
  source: /note="Description of Artificial Sequence: Synthetic polynucleotide"
atggccctccctgtcaccgccctgctgcttccgctggctcttctgctccacgccgctcggcccgaagtgcagctgctggagtccggcggtggattggtgcaaccggggggatcgctcagactgtcctgtgcggcgtcaggcttcaccttctcgagctacgccatgtcatgggtcagacaggcccctggaaagggtctggaatgggtgtccgccatttccgggagcgggggatctacatactacgccgatagcgtgaagggccgcttcaccatttcccgggacaactccaagaacactctctatctgcaaatgaactccctccgcgctgaggacactgccgtgtactactgcgccaaaatccctcagaccggcaccttcgactactggggacaggggactctggtcaccgtcagcagcggtggcggaggttcggggggaggaggaagcggcggcggagggtccgagattgtgctgacccagtcacccggcactttgtccctgtcgcctggagaaagggccaccctttcctgccgggcatcccaatccgtgtcctcctcgtacctggcctggtaccagcagaggcccggacaggccccacggcttctgatctacggagcaagcagccgcgcgaccggtatcccggaccggttttcgggctcgggctcaggaactgacttcaccctcaccatctcccgcctggaacccgaagatttcgctgtgtattactgccagcactacggcagctccccgtcctggacgttcggccagggaactcggctggagatcaagaccactaccccagcaccgaggccacccaccccggctcctaccatcgcctcccagcctctgtccctgcgtccggaggcatgtagacccgcagctggtggggccgtgcatacccggggtcttgacttcgcctgcgatatctacatttgggcccctctggctggtacttgcggggtcctgctgctttcactcgtgatcactctttactgtaagcgcggtcggaagaagctgctgtacatctttaagcaacccttcatgaggcctgtgcagactactcaagaggaggacggctgttcatgccggttcccagaggaggaggaaggcggctgcgaactgcgcgtgaaattcagccgcagcgcagatgctccagcctacaagcaggggcagaaccagctctacaacgaactcaatcttggtcggagagaggagtacgacgtgctggacaagcggagaggacgggacccagaaatgggcgggaagccgcgcagaaagaatccccaagagggcctgtacaacgagctccaaaaggataagatggcagaagcctatagcgagattggtatgaaaggggaacgcagaagaggcaaaggccacgacggactgtaccagggactcagcaccgccaccaaggacacctatgacgctcttcacatgcaggccctgccgcctcgg

SEQ ID NO: 1153 - protein, 248 aa, Artificial Sequence
  source: /note="Description of Artificial Sequence: Synthetic polypeptide"
EVQLVETGGGLVQPGGSLRLSCAASGFTFSSYAMSWVRQAPGKGLEWVSAISGSGGSTYYADSVKGRFTMSRENDKNSVFLQMNSLRVEDTGVYYCARANYKRELRYYYGMDVWGQGTMVTVSSGGGGSGGGGSGGGGSEIVMTQSPGTLSLSPGESATLSCRASQRVASNYLAWYQHKPGQAPSLLISGASSRATGVPDRFSGSGSGTDFTLAISRLEPEDSAVYYCQHYDSSPSWTFGQGTKVEIK

SEQ ID NO: 1154 - DNA, 744 bp, Artificial Sequence
  source: /note="Description of Artificial Sequence: Synthetic polynucleotide"
gaagtgcaactggtggaaaccggtggaggactcgtgcagcctggcggcagcctccggctgagctgcgccgcttcgggattcaccttttcctcctacgcgatgtcttgggtcagacaggcccccggaaaggggctggaatgggtgtcagccatctccggctccggcggatcaacgtactacgccgactccgtgaaaggccggttcaccatgtcgcgcgagaatgacaagaactccgtgttcctgcaaatgaactccctgagggtggaggacaccggagtgtactattgtgcgcgcgccaactacaagagagagctgcggtactactacggaatggacgtctggggacagggaactatggtgaccgtgtcatccggtggagggggaagcggcggtggaggcagcgggggcgggggttcagaaattgtcatgacccagtccccgggaactctttccctctcccccggggaatccgcgactttgtcctgccgggccagccagcgcgtggcctcgaactacctcgcatggtaccagcataagccaggccaagccccttccctgctgatttccggggctagcagccgcgccactggcgtgccggataggttctcgggaagcggctcgggtaccgatttcaccctggcaatctcgcggctggaaccggaggattcggccgtgtactactgccagcactatgactcatccccctcctggacattcggacagggcaccaaggtcgagatcaag

SEQ ID NO: 1155 - protein, 124 aa, Artificial Sequence
  source: /note="Description of Artificial Sequence: Synthetic polypeptide"
EVQLVETGGGLVQPGGSLRLSCAASGFTFSSYAMSWVRQAPGKGLEWVSAISGSGGSTYYADSVKGRFTMSRENDKNSVFLQMNSLRVEDTGVYYCARANYKRELRYYYGMDVWGQGTMVTVSS

SEQ ID NO: 1156 - protein, 109 aa, Artificial Sequence
  source: /note="Description of Artificial Sequence: Synthetic polypeptide"
EIVMTQSPGTLSLSPGESATLSCRASQRVASNYLAWYQHKPGQAPSLLISGASSRATGVPDRFSGSGSGTDFTLAISRLEPEDSAVYYCQHYDSSPSWTFGQGTKVEIK

SEQ ID NO: 1157 - protein, 492 aa, Artificial Sequence
  source: /note="Description of Artificial Sequence: Synthetic polypeptide"
MALPVTALLLPLALLLHAARPEVQLVETGGGLVQPGGSLRLSCAASGFTFSSYAMSWVRQAPGKGLEWVSAISGSGGSTYYADSVKGRFTMSRENDKNSVFLQMNSLRVEDTGVYYCARANYKRELRYYYGMDVWGQGTMVTVSSGGGGSGGGGSGGGGSEIVMTQSPGTLSLSPGESATLSCRASQRVASNYLAWYQHKPGQAPSLLISGASSRATGVPDRFSGSGSGTDFTLAISRLEPEDSAVYYCQHYDSSPSWTFGQGTKVEIKTTTPAPRPPTPAPTIASQPLSLRPEACRPAAGGAVHTRGLDFACDIYIWAPLAGTCGVLLLSLVITLYCKRGRKKLLYIFKQPFMRPVQTTQEEDGCSCRFPEEEEGGCELRVKFSRSADAPAYKQGQNQLYNELNLGRREEYDVLDKRRGRDPEMGGKPRRKNPQEGLYNELQKDKMAEAYSEIGMKGERRRGKGHDGLYQGLSTATKDTYDALHMQALPPR

SEQ ID NO: 1158 - DNA, 1476 bp, Artificial Sequence
  source: /note="Description of Artificial Sequence: Synthetic polynucleotide"
atggccctccctgtcaccgccctgctgcttccgctggctcttctgctccacgccgctcggcccgaagtgcaactggtggaaaccggtggaggactcgtgcagcctggcggcagcctccggctgagctgcgccgcttcgggattcaccttttcctcctacgcgatgtcttgggtcagacaggcccccggaaaggggctggaatgggtgtcagccatctccggctccggcggatcaacgtactacgccgactccgtgaaaggccggttcaccatgtcgcgcgagaatgacaagaactccgtgttcctgcaaatgaactccctgagggtggaggacaccggagtgtactattgtgcgcgcgccaactacaagagagagctgcggtactactacggaatggacgtctggggacagggaactatggtgaccgtgtcatccggtggagggggaagcggcggtggaggcagcgggggcgggggttcagaaattgtcatgacccagtccccgggaactctttccctctcccccggggaatccgcgactttgtcctgccgggccagccagcgcgtggcctcgaactacctcgcatggtaccagcataagccaggccaagccccttccctgctgatttccggggctagcagccgcgccactggcgtgccggataggttctcgggaagcggctcgggtaccgatttcaccctggcaatctcgcggctggaaccggaggattcggccgtgtactactgccagcactatgactcatccccctcctggacattcggacagggcaccaaggtcgagatcaagaccactaccccagcaccgaggccacccaccccggctcctaccatcgcctcccagcctctgtccctgcgtccggaggcatgtagacccgcagctggtggggccgtgcatacccggggtcttgacttcgcctgcgatatctacatttgggcccctctggctggtacttgcggggtcctgctgctttcactcgtgatcactctttactgtaagcgcggtcggaagaagctgctgtacatctttaagcaacccttcatgaggcctgtgcagactactcaagaggaggacggctgttcatgccggttcccagaggaggaggaaggcggctgcgaactgcgcgtgaaattcagccgcagcgcagatgctccagcctacaagcaggggcagaaccagctctacaacgaactcaatcttggtcggagagaggagtacgacgtgctggacaagcggagaggacgggacccagaaatgggcgggaagccgcgcagaaagaatccccaagagggcctgtacaacgagctccaaaaggataagatggcagaagcctatagcgagattggtatgaaaggggaacgcagaagaggcaaaggccacgacggactgtaccagggactcagcaccgccaccaaggacacctatgacgctcttcacatgcaggccctgccgcctcgg

SEQ ID NO: 1159 - protein, 244 aa, Artificial Sequence
  source: /note="Description of Artificial Sequence: Synthetic polypeptide"
EVQLLETGGGLVQPGGSLRLSCAASGFSFSSYAMSWVRQAPGKGLEWVSAISGSGGSTYYADSVKGRFTISRDNSKNTLYLQMNSLRAEDTAVYYCAKALVGATGAFDIWGQGTLVTVSSGGGGSGGGGSGGGGSEIVLTQSPGTLSLSPGERATLSCRASQSLSSNFLAWYQQKPGQAPGLLIYGASNWATGTPDRFSGSGSGTDFTLTITRLEPEDFAVYYCQYYGTSPMYTFGQGTKVEIK

SEQ ID NO: 1160 - DNA, 732 bp, Artificial Sequence
  source: /note="Description of Artificial Sequence: Synthetic polynucleotide"
gaagtgcagctgctcgaaaccggtggagggctggtgcagccagggggctccctgaggctttcatgcgccgctagcggattctccttctcctcttacgccatgtcgtgggtccgccaagcccctggaaaaggcctggaatgggtgtccgcgatttccgggagcggaggttcgacctattacgccgactccgtgaagggccgctttaccatctcccgggataactccaagaacactctgtacctccaaatgaactcgctgagagccgaggacaccgccgtgtattactgcgcgaaggcgctggtcggcgcgactggggcattcgacatctggggacagggaactcttgtgaccgtgtcgagcggaggcggcggctccggcggaggagggagcgggggcggtggttccgaaatcgtgttgactcagtccccgggaaccctgagcttgtcacccggggagcgggccactctctcctgtcgcgcctcccaatcgctctcatccaatttcctggcctggtaccagcagaagcccggacaggccccgggcctgctcatctacggcgcttcaaactgggcaacgggaacccctgatcggttcagcggaagcggatcgggtactgactttaccctgaccatcaccagactggaaccggaggacttcgccgtgtactactgccagtactacggcacctcccccatgtacacattcggacagggtaccaaggtcgagattaag

SEQ ID NO: 1161 - protein, 120 aa, Artificial Sequence
  source: /note="Description of Artificial Sequence: Synthetic polypeptide"
EVQLLETGGGLVQPGGSLRLSCAASGFSFSSYAMSWVRQAPGKGLEWVSAISGSGGSTYYADSVKGRFTISRDNSKNTLYLQMNSLRAEDTAVYYCAKALVGATGAFDIWGQGTLVTVSS

SEQ ID NO: 1162 - protein, 109 aa, Artificial Sequence
  source: /note="Description of Artificial Sequence: Synthetic polypeptide"
EIVLTQSPGTLSLSPGERATLSCRASQSLSSNFLAWYQQKPGQAPGLLIYGASNWATGTPDRFSGSGSGTDFTLTITRLEPEDFAVYYCQYYGTSPMYTFGQGTKVEIK

SEQ ID NO: 1163 - protein, 488 aa, Artificial Sequence
  source: /note="Description of Artificial Sequence: Synthetic polypeptide"
MALPVTALLLPLALLLHAARPEVQLLETGGGLVQPGGSLRLSCAASGFSFSSYAMSWVRQAPGKGLEWVSAISGSGGSTYYADSVKGRFTISRDNSKNTLYLQMNSLRAEDTAVYYCAKALVGATGAFDIWGQGTLVTVSSGGGGSGGGGSGGGGSEIVLTQSPGTLSLSPGERATLSCRASQSLSSNFLAWYQQKPGQAPGLLIYGASNWATGTPDRFSGSGSGTDFTLTITRLEPEDFAVYYCQYYGTSPMYTFGQGTKVEIKTTTPAPRPPTPAPTIASQPLSLRPEACRPAAGGAVHTRGLDFACDIYIWAPLAGTCGVLLLSLVITLYCKRGRKKLLYIFKQPFMRPVQTTQEEDGCSCRFPEEEEGGCELRVKFSRSADAPAYKQGQNQLYNELNLGRREEYDVLDKRRGRDPEMGGKPRRKNPQEGLYNELQKDKMAEAYSEIGMKGERRRGKGHDGLYQGLSTATKDTYDALHMQALPPR

SEQ ID NO: 1164 - DNA, 1464 bp, Artificial Sequence
  source: /note="Description of Artificial Sequence: Synthetic polynucleotide"
atggccctccctgtcaccgccctgctgcttccgctggctcttctgctccacgccgctcggcccgaagtgcagctgctcgaaaccggtggagggctggtgcagccagggggctccctgaggctttcatgcgccgctagcggattctccttctcctcttacgccatgtcgtgggtccgccaagcccctggaaaaggcctggaatgggtgtccgcgatttccgggagcggaggttcgacctattacgccgactccgtgaagggccgctttaccatctcccgggataactccaagaacactctgtacctccaaatgaactcgctgagagccgaggacaccgccgtgtattactgcgcgaaggcgctggtcggcgcgactggggcattcgacatctggggacagggaactcttgtgaccgtgtcgagcggaggcggcggctccggcggaggagggagcgggggcggtggttccgaaatcgtgttgactcagtccccgggaaccctgagcttgtcacccggggagcgggccactctctcctgtcgcgcctcccaatcgctctcatccaatttcctggcctggtaccagcagaagcccggacaggccccgggcctgctcatctacggcgcttcaaactgggcaacgggaacccctgatcggttcagcggaagcggatcgggtactgactttaccctgaccatcaccagactggaaccggaggacttcgccgtgtactactgccagtactacggcacctcccccatgtacacattcggacagggtaccaaggtcgagattaagaccactaccccagcaccgaggccacccaccccggctcctaccatcgcctcccagcctctgtccctgcgtccggaggcatgtagacccgcagctggtggggccgtgcatacccggggtcttgacttcgcctgcgatatctacatttgggcccctctggctggtacttgcggggtcctgctgctttcactcgtgatcactctttactgtaagcgcggtcggaagaagctgctgtacatctttaagcaacccttcatgaggcctgtgcagactactcaagaggaggacggctgttcatgccggttcccagaggaggaggaaggcggctgcgaactgcgcgtgaaattcagccgcagcgcagatgctccagcctacaagcaggggcagaaccagctctacaacgaactcaatcttggtcggagagaggagtacgacgtgctggacaagcggagaggacgggacccagaaatgggcgggaagccgcgcagaaagaatccccaagagggcctgtacaacgagctccaaaaggataagatggcagaagcctatagcgagattggtatgaaaggggaacgcagaagaggcaaaggccacgacggactgtaccagggactcagcaccgccaccaaggacacctatgacgctcttcacatgcaggccctgccgcctcgg

SEQ ID NO: 1165 - protein, 244 aa, Artificial Sequence
  source: /note="Description of Artificial Sequence: Synthetic polypeptide"
EVQLLESGGGLVQPGGSLRLSCAASGFTFSSYAMSWVRQAPGKGLEWVSAISGSGGSTYYADSVKGRFTISRDNSKNTLYLQMNSLRAEDTAVYYCVLWFGEGFDPWGQGTLVTVSSGGGGSGGGGSGGGGSDIVLTQSPLSLPVTPGEPASISCRSSQSLLHSNGYNYLDWYLQKPGQSPQLLIYLGSNRASGVPDRFSGSGSGTDFTLKISRVEAEDVGVYYCMQALQTPLTFGGGTKVDIK

SEQ ID NO: 1166 - DNA, 733 bp, Artificial Sequence
  source: /note="Description of Artificial Sequence: Synthetic polynucleotide"
gaagtgcagctgcttgagagcggtggaggtctggtgcagcccgggggatcactgcgcctgtcctgtgccgcgtccggtttcactttctcctcgtacgccatgtcgtgggtcagacaggcaccgggaaagggactggaatgggtgtcagccatttcgggttcggggggcagcacctactacgctgactccgtgaagggccggttcaccatttcccgcgacaactccaagaacaccttgtacctccaaatgaactccctgcgggccgaagataccgccgtgtattactgcgtgctgtggttcggagagggattcgacccgtggggacaaggaacactcgtgactgtgtcatccggcggaggcggcagcggtggcggcggttccggcggcggcggatctgacatcgtgttgacccagtcccctctgagcctgccggtcactcctggcgaaccagccagcatctcctgccggtcgagccagtccctcctgcactccaatgggtacaactacctcgattggtatctgcaaaagccgggccagagcccccagctgctgatctaccttgggtcaaaccgcgcttccggggtgcctgatagattctccgggtccgggagcggaaccgactttaccctgaaaatctcgagggtggaggccgaggacgtcggagtgtactactgcatgcaggcgctccagactcccctgaccttcggaggaggaacgaaggtcgacatcaaga

SEQ ID NO: 1167 - protein, 117 aa, Artificial Sequence
  source: /note="Description of Artificial Sequence: Synthetic polypeptide"
EVQLLESGGGLVQPGGSLRLSCAASGFTFSSYAMSWVRQAPGKGLEWVSAISGSGGSTYYADSVKGRFTISRDNSKNTLYLQMNSLRAEDTAVYYCVLWFGEGFDPWGQGTLVTVSS

SEQ ID NO: 1168 - protein, 112 aa, Artificial Sequence
  source: /note="Description of Artificial Sequence: Synthetic polypeptide"
DIVLTQSPLSLPVTPGEPASISCRSSQSLLHSNGYNYLDWYLQKPGQSPQLLIYLGSNRASGVPDRFSGSGSGTDFTLKISRVEAEDVGVYYCMQALQTPLTFGGGTKVDIK

SEQ ID NO: 1169 - protein, 488 aa, Artificial Sequence
  source: /note="Description of Artificial Sequence: Synthetic polypeptide"
MALPVTALLLPLALLLHAARPEVQLLESGGGLVQPGGSLRLSCAASGFTFSSYAMSWVRQAPGKGLEWVSAISGSGGSTYYADSVKGRFTISRDNSKNTLYLQMNSLRAEDTAVYYCVLWFGEGFDPWGQGTLVTVSSGGGGSGGGGSGGGGSDIVLTQSPLSLPVTPGEPASISCRSSQSLLHSNGYNYLDWYLQKPGQSPQLLIYLGSNRASGVPDRFSGSGSGTDFTLKISRVEAEDVGVYYCMQALQTPLTFGGGTKVDIKTTTPAPRPPTPAPTIASQPLSLRPEACRPAAGGAVHTRGLDFACDIYIWAPLAGTCGVLLLSLVITLYCKRGRKKLLYIFKQPFMRPVQTTQEEDGCSCRFPEEEEGGCELRVKFSRSADAPAYKQGQNQLYNELNLGRREEYDVLDKRRGRDPEMGGKPRRKNPQEGLYNELQKDKMAEAYSEIGMKGERRRGKGHDGLYQGLSTATKDTYDALHMQALPPR

SEQ ID NO: 1170 - DNA, 1464 bp, Artificial Sequence
  source: /note="Description of Artificial Sequence: Synthetic polynucleotide"
atggccctccctgtcaccgccctgctgcttccgctggctcttctgctccacgccgctcggcccgaagtgcagctgcttgagagcggtggaggtctggtgcagcccgggggatcactgcgcctgtcctgtgccgcgtccggtttcactttctcctcgtacgccatgtcgtgggtcagacaggcaccgggaaagggactggaatgggtgtcagccatttcgggttcggggggcagcacctactacgctgactccgtgaagggccggttcaccatttcccgcgacaactccaagaacaccttgtacctccaaatgaactccctgcgggccgaagataccgccgtgtattactgcgtgctgtggttcggagagggattcgacccgtggggacaaggaacactcgtgactgtgtcatccggcggaggcggcagcggtggcggcggttccggcggcggcggatctgacatcgtgttgacccagtcccctctgagcctgccggtcactcctggcgaaccagccagcatctcctgccggtcgagccagtccctcctgcactccaatgggtacaactacctcgattggtatctgcaaaagccgggccagagcccccagctgctgatctaccttgggtcaaaccgcgcttccggggtgcctgatagattctccgggtccgggagcggaaccgactttaccctgaaaatctcgagggtggaggccgaggacgtcggagtgtactactgcatgcaggcgctccagactcccctgaccttcggaggaggaacgaaggtcgacatcaagaccactaccccagcaccgaggccacccaccccggctcctaccatcgcctcccagcctctgtccctgcgtccggaggcatgtagacccgcagctggtggggccgtgcatacccggggtcttgacttcgcctgcgatatctacatttgggcccctctggctggtacttgcggggtcctgctgctttcactcgtgatcactctttactgtaagcgcggtcggaagaagctgctgtacatctttaagcaacccttcatgaggcctgtgcagactactcaagaggaggacggctgttcatgccggttcccagaggaggaggaaggcggctgcgaactgcgcgtgaaattcagccgcagcgcagatgctccagcctacaagcaggggcagaaccagctctacaacgaactcaatcttggtcggagagaggagtacgacgtgctggacaagcggagaggacgggacccagaaatgggcgggaagccgcgcagaaagaatccccaagagggcctgtacaacgagctccaaaaggataagatggcagaagcctatagcgagattggtatgaaaggggaacgcagaagaggcaaaggccacgacggactgtaccagggactcagcaccgccaccaaggacacctatgacgctcttcacatgcaggccctgccgcctcgg

SEQ ID NO: 1171 - protein, 251 aa, Artificial Sequence
  source: /note="Description of Artificial Sequence: Synthetic polypeptide"
QVQLVESGGGLVQPGGSLRLSCAASGFTFSSYAMSWVRQAPGKGLEWVSAISGSGGSTYYADSVKGRFTISRDNSKNTLYLQMNSLRAEDTAVYYCAKVGYDSSGYYRDYYGMDVWGQGTTVTVSSGGGGSGGGGSGGGGSEIVLTQSPGTLSLSPGERATLSCRASQSVSSSYLAWYQQKPGQAPRLLIYGTSSRATGISDRFSGSGSGTDFTLTISRLEPEDFAVYYCQHYGNSPPKFTFGPGTKLEIK

SEQ ID NO: 1172 - DNA, 753 bp, Artificial Sequence
  source: /note="Description of Artificial Sequence: Synthetic polynucleotide"
caagtgcagctcgtggagtcaggcggaggactggtgcagcccgggggctccctgagactttcctgcgcggcatcgggttttaccttctcctcctatgctatgtcctgggtgcgccaggccccgggaaagggactggaatgggtgtccgcaatcagcggtagcgggggctcaacatactacgccgactccgtcaagggtcgcttcactatttcccgggacaactccaagaataccctgtacctccaaatgaacagcctcagggccgaggatactgccgtgtactactgcgccaaagtcggatacgatagctccggttactaccgggactactacggaatggacgtgtggggacagggcaccaccgtgaccgtgtcaagcggcggaggcggttcaggagggggaggctccggcggtggagggtccgaaatcgtcctgactcagtcgcctggcactctgtcgttgtccccgggggagcgcgctaccctgtcgtgtcgggcgtcgcagtccgtgtcgagctcctacctcgcgtggtaccagcagaagcccggacaggcccctagacttctgatctacggcacttcttcacgcgccaccgggatcagcgacaggttcagcggctccggctccgggaccgacttcaccctgaccattagccggctggagcctgaagatttcgccgtgtattactgccaacactacggaaactcgccgccaaagttcacgttcggacccggaaccaagctggaaatcaag

SEQ ID NO: 1173 - protein, 126 aa, Artificial Sequence
  source: /note="Description of Artificial Sequence: Synthetic polypeptide"
QVQLVESGGGLVQPGGSLRLSCAASGFTFSSYAMSWVRQAPGKGLEWVSAISGSGGSTYYADSVKGRFTISRDNSKNTLYLQMNSLRAEDTAVYYCAKVGYDSSGYYRDYYGMDVWGQGTTVTVSS

SEQ ID NO: 1174 - protein, 110 aa, Artificial Sequence
  source: /note="Description of Artificial Sequence: Synthetic polypeptide"
EIVLTQSPGTLSLSPGERATLSCRASQSVSSSYLAWYQQKPGQAPRLLIYGTSSRATGISDRFSGSGSGTDFTLTISRLEPEDFAVYYCQHYGNSPPKFTFGPGTKLEIK

SEQ ID NO: 1175 - protein, 495 aa, Artificial Sequence
  source: /note="Description of Artificial Sequence: Synthetic polypeptide"
MALPVTALLLPLALLLHAARPQVQLVESGGGLVQPGGSLRLSCAASGFTFSSYAMSWVRQAPGKGLEWVSAISGSGGSTYYADSVKGRFTISRDNSKNTLYLQMNSLRAEDTAVYYCAKVGYDSSGYYRDYYGMDVWGQGTTVTVSSGGGGSGGGGSGGGGSEIVLTQSPGTLSLSPGERATLSCRASQSVSSSYLAWYQQKPGQAPRLLIYGTSSRATGISDRFSGSGSGTDFTLTISRLEPEDFAVYYCQHYGNSPPKFTFGPGTKLEIKTTTPAPRPPTPAPTIASQPLSLRPEACRPAAGGAVHTRGLDFACDIYIWAPLAGTCGVLLLSLVITLYCKRGRKKLLYIFKQPFMRPVQTTQEEDGCSCRFPEEEEGGCELRVKFSRSADAPAYKQGQNQLYNELNLGRREEYDVLDKRRGRDPEMGGKPRRKNPQEGLYNELQKDKMAEAYSEIGMKGERRRGKGHDGLYQGLSTATKDTYDALHMQALPPR

SEQ ID NO: 1176 - DNA, 1485 bp, Artificial Sequence
  source: /note="Description of Artificial Sequence: Synthetic polynucleotide"
atggccctccctgtcaccgccctgctgcttccgctggctcttctgctccacgccgctcggccccaagtgcagctcgtggagtcaggcggaggactggtgcagcccgggggctccctgagactttcctgcgcggcatcgggttttaccttctcctcctatgctatgtcctgggtgcgccaggccccgggaaagggactggaatgggtgtccgcaatcagcggtagcgggggctcaacatactacgccgactccgtcaagggtcgcttcactatttcccgggacaactccaagaataccctgtacctccaaatgaacagcctcagggccgaggatactgccgtgtactactgcgccaaagtcggatacgatagctccggttactaccgggactactacggaatggacgtgtggggacagggcaccaccgtgaccgtgtcaagcggcggaggcggttcaggagggggaggctccggcggtggagggtccgaaatcgtcctgactcagtcgcctggcactctgtcgttgtccccgggggagcgcgctaccctgtcgtgtcgggcgtcgcagtccgtgtcgagctcctacctcgcgtggtaccagcagaagcccggacaggcccctagacttctgatctacggcacttcttcacgcgccaccgggatcagcgacaggttcagcggctccggctccgggaccgacttcaccctgaccattagccggctggagcctgaagatttcgccgtgtattactgccaacactacggaaactcgccgccaaagttcacgttcggacccggaaccaagctggaaatcaagaccactaccccagcaccgaggccacccaccccggctcctaccatcgcctcccagcctctgtccctgcgtccggaggcatgtagacccgcagctggtggggccgtgcatacccggggtcttgacttcgcctgcgatatctacatttgggcccctctggctggtacttgcggggtcctgctgctttcactcgtgatcactctttactgtaagcgcggtcggaagaagctgctgtacatctttaagcaacccttcatgaggcctgtgcagactactcaagaggaggacggctgttcatgccggttcccagaggaggaggaaggcggctgcgaactgcgcgtgaaattcagccgcagcgcagatgctccagcctacaagcaggggcagaaccagctctacaacgaactcaatcttggtcggagagaggagtacgacgtgctggacaagcggagaggacgggacccagaaatgggcgggaagccgcgcagaaagaatccccaagagggcctgtacaacgagctccaaaaggataagatggcagaagcctatagcgagattggtatgaaaggggaacgcagaagaggcaaaggccacgacggactgtaccagggactcagcaccgccaccaaggacacctatgacgctcttcacatgcaggccctgccgcctcgg

SEQ ID NO: 1177 - protein, 246 aa, Artificial Sequence
  source: /note="Description of Artificial Sequence: Synthetic polypeptide"
EVQLVESGGGLVQPGGSLRLSCAASGFTFSSYAMSWVRQAPGKGLEWVSAISGSGGSTYYADSVKGRFTISRDNSKNTLYLQMNSLRAEDTAVYYCAKMGWSSGYLGAFDIWGQGTTVTVSSGGGGSGGGGSGGGGSEIVLTQSPGTLSLSPGERATLSCRASQSVASSFLAWYQQKPGQAPRLLIYGASGRATGIPDRFSGSGSGTDFTLTISRLEPEDFAVYYCQHYGGSPRLTFGGGTKVDIK

SEQ ID NO: 1178 - DNA, 739 bp, Artificial Sequence
  source: /note="Description of Artificial Sequence: Synthetic polynucleotide"
gaagtccaactggtggagtccgggggagggctcgtgcagcccggaggcagccttcggctgtcgtgcgccgcctccgggttcacgttctcatcctacgcgatgtcgtgggtcagacaggcaccaggaaagggactggaatgggtgtccgccattagcggctccggcggtagcacctactatgccgactcagtgaagggaaggttcactatctcccgcgacaacagcaagaacaccctgtacctccaaatgaactctctgcgggccgaggataccgcggtgtactattgcgccaagatgggttggtccagcggatacttgggagccttcgacatttggggacagggcactactgtgaccgtgtcctccgggggtggcggatcgggaggcggcggctcgggtggagggggttccgaaatcgtgttgacccagtcaccgggaaccctctcgctgtccccgggagaacgggctacactgtcatgtagagcgtcccagtccgtggcttcctcgttcctggcctggtaccagcagaagccgggacaggcaccccgcctgctcatctacggagccagcggccgggcgaccggcatccctgaccgcttctccggttccggctcgggcaccgactttactctgaccattagcaggcttgagcccgaggattttgccgtgtactactgccaacactacggggggagccctcgcctgaccttcggaggcggaactaaggtcgatatcaaaa

SEQ ID NO: 1179 - protein, 122 aa, Artificial Sequence
  source: /note="Description of Artificial Sequence: Synthetic polypeptide"
EVQLVESGGGLVQPGGSLRLSCAASGFTFSSYAMSWVRQAPGKGLEWVSAISGSGGSTYYADSVKGRFTISRDNSKNTLYLQMNSLRAEDTAVYYCAKMGWSSGYLGAFDIWGQGTTVTVSS

SEQ ID NO: 1180 - protein, 109 aa, Artificial Sequence
  source: /note="Description of Artificial Sequence: Synthetic polypeptide"
EIVLTQSPGTLSLSPGERATLSCRASQSVASSFLAWYQQKPGQAPRLLIYGASGRATGIPDRFSGSGSGTDFTLTISRLEPEDFAVYYCQHYGGSPRLTFGGGTKVDIK

SEQ ID NO: 1181 - protein, 490 aa, Artificial Sequence
  source: /note="Description of Artificial Sequence: Synthetic polypeptide"
MALPVTALLLPLALLLHAARPEVQLVESGGGLVQPGGSLRLSCAASGFTFSSYAMSWVRQAPGKGLEWVSAISGSGGSTYYADSVKGRFTISRDNSKNTLYLQMNSLRAEDTAVYYCAKMGWSSGYLGAFDIWGQGTTVTVSSGGGGSGGGGSGGGGSEIVLTQSPGTLSLSPGERATLSCRASQSVASSFLAWYQQKPGQAPRLLIYGASGRATGIPDRFSGSGSGTDFTLTISRLEPEDFAVYYCQHYGGSPRLTFGGGTKVDIKTTTPAPRPPTPAPTIASQPLSLRPEACRPAAGGAVHTRGLDFACDIYIWAPLAGTCGVLLLSLVITLYCKRGRKKLLYIFKQPFMRPVQTTQEEDGCSCRFPEEEEGGCELRVKFSRSADAPAYKQGQNQLYNELNLGRREEYDVLDKRRGRDPEMGGKPRRKNPQEGLYNELQKDKMAEAYSEIGMKGERRRGKGHDGLYQGLSTATKDTYDALHMQALPPR

SEQ ID NO: 1182 - DNA, 1470 bp, Artificial Sequence
  source: /note="Description of Artificial Sequence: Synthetic polynucleotide"
atggccctccctgtcaccgccctgctgcttccgctggctcttctgctccacgccgctcggcccgaagtccaactggtggagtccgggggagggctcgtgcagcccggaggcagccttcggctgtcgtgcgccgcctccgggttcacgttctcatcctacgcgatgtcgtgggtcagacaggcaccaggaaagggactggaatgggtgtccgccattagcggctccggcggtagcacctactatgccgactcagtgaagggaaggttcactatctcccgcgacaacagcaagaacaccctgtacctccaaatgaactctctgcgggccgaggataccgcggtgtactattgcgccaagatgggttggtccagcggatacttgggagccttcgacatttggggacagggcactactgtgaccgtgtcctccgggggtggcggatcgggaggcggcggctcgggtggagggggttccgaaatcgtgttgacccagtcaccgggaaccctctcgctgtccccgggagaacgggctacactgtcatgtagagcgtcccagtccgtggcttcctcgttcctggcctggtaccagcagaagccgggacaggcaccccgcctgctcatctacggagccagcggccgggcgaccggcatccctgaccgcttctccggttccggctcgggcaccgactttactctgaccattagcaggcttgagcccgaggattttgccgtgtactactgccaacactacggggggagccctcgcctgaccttcggaggcggaactaaggtcgatatcaaaaccactaccccagcaccgaggccacccaccccggctcctaccatcgcctcccagcctctgtccctgcgtccggaggcatgtagacccgcagctggtggggccgtgcatacccggggtcttgacttcgcctgcgatatctacatttgggcccctctggctggtacttgcggggtcctgctgctttcactcgtgatcactctttactgtaagcgcggtcggaagaagctgctgtacatctttaagcaacccttcatgaggcctgtgcagactactcaagaggaggacggctgttcatgccggttcccagaggaggaggaaggcggctgcgaactgcgcgtgaaattcagccgcagcgcagatgctccagcctacaagcaggggcagaaccagctctacaacgaactcaatcttggtcggagagaggagtacgacgtgctggacaagcggagaggacgggacccagaaatgggcgggaagccgcgcagaaagaatccccaagagggcctgtacaacgagctccaaaaggataagatggcagaagcctatagcgagattggtatgaaaggggaacgcagaagaggcaaaggccacgacggactgtaccagggactcagcaccgccaccaaggacacctatgacgctcttcacatgcaggccctgccgcctcgg

SEQ ID NO: 1183 - protein, 122 aa, Artificial Sequence
  source: /note="Description of Artificial Sequence: Synthetic polypeptide"
QIQLVQSGPDLKKPGETVKLSCKASGYTFTNFGMNWVKQAPGKGFKWMAWINTYTGESYFADDFKGRFAFSVETSATTAYLQINNLKTEDTATYFCARGEIYYGYDGGFAYWGQGTLVTVSA

SEQ ID NO: 1184 - protein, 107 aa, Artificial Sequence
  source: /note="Description of Artificial Sequence: Synthetic polypeptide"
DVVMTQSHRFMSTSVGDRVSITCRASQDVNTAVSWYQQKPGQSPKLLIFSASYRYTGVPDRFTGSGSGADFTLTISSVQAEDLAVYYCQQHYSTPWTFGGGTKLDIK

SEQ ID NO: 1185 - protein, 244 aa, Artificial Sequence
  source: /note="Description of Artificial Sequence: Synthetic polypeptide"
QIQLVQSGPDLKKPGETVKLSCKASGYTFTNFGMNWVKQAPGKGFKWMAWINTYTGESYFADDFKGRFAFSVETSATTAYLQINNLKTEDTATYFCARGEIYYGYDGGFAYWGQGTLVTVSAGGGGSGGGGSGGGGSDVVMTQSHRFMSTSVGDRVSITCRASQDVNTAVSWYQQKPGQSPKLLIFSASYRYTGVPDRFTGSGSGADFTLTISSVQAEDLAVYYCQQHYSTPWTFGGGTKLDIK

SEQ ID NO: 1186 - protein, 467 aa, Artificial Sequence
  source: /note="Description of Artificial Sequence: Synthetic polypeptide"
QIQLVQSGPDLKKPGETVKLSCKASGYTFTNFGMNWVKQAPGKGFKWMAWINTYTGESYFADDFKGRFAFSVETSATTAYLQINNLKTEDTATYFCARGEIYYGYDGGFAYWGQGTLVTVSAGGGGSGGGGSGGGGSDVVMTQSHRFMSTSVGDRVSITCRASQDVNTAVSWYQQKPGQSPKLLIFSASYRYTGVPDRFTGSGSGADFTLTISSVQAEDLAVYYCQQHYSTPWTFGGGTKLDIKTTTPAPRPPTPAPTIASQPLSLRPEACRPAAGGAVHTRGLDFACDIYIWAPLAGTCGVLLLSLVITLYCKRGRKKLLYIFKQPFMRPVQTTQEEDGCSCRFPEEEEGGCELRVKFSRSADAPAYKQGQNQLYNELNLGRREEYDVLDKRRGRDPEMGGKPRRKNPQEGLYNELQKDKMAEAYSEIGMKGERRRGKGHDGLYQGLSTATKDTYDALHMQALPPR

SEQ ID NO: 1187 - protein, 117 aa, Artificial Sequence; identical to SEQ ID NO: 425
  source: /note="Description of Artificial Sequence: Synthetic polypeptide"

SEQ ID NO: 1188 - protein, 111 aa, Artificial Sequence
  source: /note="Description of Artificial Sequence: Synthetic polypeptide"
DIVLTQSPASLAMSLGKRATISCRASESVSVIGAHLIHWYQQKPGQPPKLLIYLASNLETGVPARFSGSGSGTDFTLTIDPVEEDDVAIYSCLQSRIFPRTFGGGTKLEIK

SEQ ID NO: 1189 - protein, 249 aa, Artificial Sequence
  source: /note="Description of Artificial Sequence: Synthetic polypeptide"
QIQLVQSGPELKKPGETVKISCKASGYTFTDYSINWVKRAPGKGLKWMGWINTETREPAYAYDFRGRFAFSLETSASTAYLQINNLKYEDTATYFCALDYSYAMDYWGQGTSVTVSSGGGGSGGGGSGGGGSQIQLVQSGPELKKPGETVKISCKASGYTFTDYSINWVKRAPGKGLKWMGWINTETREPAYAYDFRGRFAFSLETSASTAYLQINNLKYEDTATYFCALDYSYAMDYWGQGTSVTVSS

SEQ ID NO: 1190 - protein, 472 aa, Artificial Sequence
  source: /note="Description of Artificial Sequence: Synthetic polypeptide"
QIQLVQSGPELKKPGETVKISCKASGYTFTDYSINWVKRAPGKGLKWMGWINTETREPAYAYDFRGRFAFSLETSASTAYLQINNLKYEDTATYFCALDYSYAMDYWGQGTSVTVSSGGGGSGGGGSGGGGSQIQLVQSGPELKKPGETVKISCKASGYTFTDYSINWVKRAPGKGLKWMGWINTETREPAYAYDFRGRFAFSLETSASTAYLQINNLKYEDTATYFCALDYSYAMDYWGQGTSVTVSSTTTPAPRPPTPAPTIASQPLSLRPEACRPAAGGAVHTRGLDFACDIYIWAPLAGTCGVLLLSLVITLYCKRGRKKLLYIFKQPFMRPVQTTQEEDGCSCRFPEEEEGGCELRVKFSRSADAPAYKQGQNQLYNELNLGRREEYDVLDKRRGRDPEMGGKPRRKNPQEGLYNELQKDKMAEAYSEIGMKGERRRGKGHDGLYQGLSTATKDTYDALHMQALPPR

SEQ ID NO: 1191 - protein, 117 aa, Artificial Sequence
  source: /note="Description of Artificial Sequence: Synthetic polypeptide"
QIQLVQSGPELKKPGETVKISCKASGYTFRHYSMNWVKQAPGKGLKWMGRINTESGVPIYADDFKGRFAFSVETSASTAYLVINNLKDEDTASYFCSNDYLYSLDFWGQGTALTVSS

SEQ ID NO: 1192 - protein, 111 aa, Artificial Sequence
  source: /note="Description of Artificial Sequence: Synthetic polypeptide"
DIVLTQSPPSLAMSLGKRATISCRASESVTILGSHLIYWYQQKPGQPPTLLIQLASNVQTGVPARFSGSGSRTDFTLTIDPVEEDDVAVYYCLQSRTIPRTFGGGTKLEIK

SEQ ID NO: 1193 - protein, 243 aa, Artificial Sequence
  source: /note="Description of Artificial Sequence: Synthetic polypeptide"
QIQLVQSGPELKKPGETVKISCKASGYTFRHYSMNWVKQAPGKGLKWMGRINTESGVPIYADDFKGRFAFSVETSASTAYLVINNLKDEDTASYFCSNDYLYSLDFWGQGTALTVSSGGGGSGGGGSGGGGSDIVLTQSPPSLAMSLGKRATISCRASESVTILGSHLIYWYQQKPGQPPTLLIQLASNVQTGVPARFSGSGSRTDFTLTIDPVEEDDVAVYYCLQSRTIPRTFGGGTKLEIK

SEQ ID NO: 1194 - protein, 466 aa, Artificial Sequence
  source: /note="Description of Artificial Sequence: Synthetic polypeptide"
QIQLVQSGPELKKPGETVKISCKASGYTFRHYSMNWVKQAPGKGLKWMGRINTESGVPIYADDFKGRFAFSVETSASTAYLVINNLKDEDTASYFCSNDYLYSLDFWGQGTALTVSSGGGGSGGGGSGGGGSDIVLTQSPPSLAMSLGKRATISCRASESVTILGSHLIYWYQQKPGQPPTLLIQLASNVQTGVPARFSGSGSRTDFTLTIDPVEEDDVAVYYCLQSRTIPRTFGGGTKLEIKTTTPAPRPPTPAPTIASQPLSLRPEACRPAAGGAVHTRGLDFACDIYIWAPLAGTCGVLLLSLVITLYCKRGRKKLLYIFKQPFMRPVQTTQEEDGCSCRFPEEEEGGCELRVKFSRSADAPAYKQGQNQLYNELNLGRREEYDVLDKRRGRDPEMGGKPRRKNPQEGLYNELQKDKMAEAYSEIGMKGERRRGKGHDGLYQGLSTATKDTYDALHMQALPPR

SEQ ID NO: 1195 - protein, 117 aa, Artificial Sequence
  source: /note="Description of Artificial Sequence: Synthetic polypeptide"
QIQLVQSGPELKKPGETVKISCKASGYTFTHYSMNWVKQAPGKGLKWMGRINTETGEPLYADDFKGRFAFSLETSASTAYLVINNLKNEDTATFFCSNDYLYSCDYWGQGTTLTVSS

SEQ ID NO: 1196 - protein, 111 aa, Artificial Sequence; identical to SEQ ID NO: 1192
  source: /note="Description of Artificial Sequence: Synthetic polypeptide"

SEQ ID NO: 1197 - protein, 243 aa, Artificial Sequence
  source: /note="Description of Artificial Sequence: Synthetic polypeptide"
QIQLVQSGPELKKPGETVKISCKASGYTFTHYSMNWVKQAPGKGLKWMGRINTETGEPLYADDFKGRFAFSLETSASTAYLVINNLKNEDTATFFCSNDYLYSCDYWGQGTTLTVSSGGGGSGGGGSGGGGSDIVLTQSPPSLAMSLGKRATISCRASESVTILGSHLIYWYQQKPGQPPTLLIQLASNVQTGVPARFSGSGSRTDFTLTIDPVEEDDVAVYYCLQSRTIPRTFGGGTKLEIK

SEQ ID NO: 1198 - protein, 466 aa, Artificial Sequence
  source: /note="Description of Artificial Sequence: Synthetic polypeptide"
QIQLVQSGPELKKPGETVKISCKASGYTFTHYSMNWVKQAPGKGLKWMGRINTETGEPLYADDFKGRFAFSLETSASTAYLVINNLKNEDTATFFCSNDYLYSCDYWGQGTTLTVSSGGGGSGGGGSGGGGSDIVLTQSPPSLAMSLGKRATISCRASESVTILGSHLIYWYQQKPGQPPTLLIQLASNVQTGVPARFSGSGSRTDFTLTIDPVEEDDVAVYYCLQSRTIPRTFGGGTKLEIKTTTPAPRPPTPAPTIASQPLSLRPEACRPAAGGAVHTRGLDFACDIYIWAPLAGTCGVLLLSLVITLYCKRGRKKLLYIFKQPFMRPVQTTQEEDGCSCRFPEEEEGGCELRVKFSRSADAPAYKQGQNQLYNELNLGRREEYDVLDKRRGRDPEMGGKPRRKNPQEGLYNELQKDKMAEAYSEIGMKGERRRGKGHDGLYQGLSTATKDTYDALHMQALPPR

SEQ ID NO: 1199 - protein, 5 aa, Artificial Sequence
  source: /note="Description of Artificial Sequence: Synthetic peptide"
NHGMS

SEQ ID NO: 1200 - protein, 5 aa, Artificial Sequence
  source: /note="Description of Artificial Sequence: Synthetic peptide"
NYAMS

SEQ ID NO: 1201 - protein, 5 aa, Artificial Sequence
  source: /note="Description of Artificial Sequence: Synthetic peptide"
DYAMH

SEQ ID NO: 1202 - protein, 5 aa, Artificial Sequence
  source: /note="Description of Artificial Sequence: Synthetic peptide"
NHGMS

SEQ ID NO: 1203 - protein, 5 aa, Artificial Sequence
  source: /note="Description of Artificial Sequence: Synthetic peptide"
NFGIN

SEQ ID NO: 1204 - protein, 5 aa, Artificial Sequence
  source: /note="Description of Artificial Sequence: Synthetic peptide"
SDAMT

SEQ ID NO: 1205 - protein, 5 aa, Artificial Sequence
  source: /note="Description of Artificial Sequence: Synthetic peptide"
NYGIT

SEQ ID NO: 1206 - protein, 5 aa, Artificial Sequence
  source: /note="Description of Artificial Sequence: Synthetic peptide"
NHGMS

SEQ ID NO: 1207 - protein, 5 aa, Artificial Sequence
  source: /note="Description of Artificial Sequence: Synthetic peptide"
NHGMS

SEQ ID NO: 1208 - protein, 5 aa, Artificial Sequence
  source: /note="Description of Artificial Sequence: Synthetic peptide"
NHGMS

SEQ ID NO: 1209 - protein, 5 aa, Artificial Sequence
  source: /note="Description of Artificial Sequence: Synthetic peptide"
DYYMS

SEQ ID NO: 1210 - protein, 5 aa, Artificial Sequence
  source: /note="Description of Artificial Sequence: Synthetic peptide"
DYYMS

SEQ ID NO: 1211 - protein, 5 aa, Artificial Sequence
  source: /note="Description of Artificial Sequence: Synthetic peptide"
NHGMS

SEQ ID NO: 1212 - protein, 5 aa, Artificial Sequence
  source: /note="Description of Artificial Sequence: Synthetic peptide"
NHGMS

SEQ ID NO: 1213 - protein, 5 aa, Artificial Sequence
  source: /note="Description of Artificial Sequence: Synthetic peptide"
NHGMS

SEQ ID NO: 1214 - protein, 7 aa, Artificial Sequence
  source: /note="Description of Artificial Sequence: Synthetic peptide"
SSYYYWG

SEQ ID NO: 1215 - protein, 7 aa, Artificial Sequence
  source: /note="Description of Artificial Sequence: Synthetic peptide"
TSGMCVS

SEQ ID NO: 1216 - protein, 5 aa, Artificial Sequence
  source: /note="Description of Artificial Sequence: Synthetic peptide"
SYSMN

SEQ ID NO: 1217 - protein, 5 aa, Artificial Sequence
  source: /note="Description of Artificial Sequence: Synthetic peptide"
DYYMS

SEQ ID NO: 1218 - protein, 5 aa, Artificial Sequence
  source: /note="Description of Artificial Sequence: Synthetic peptide"
SHYIH

SEQ ID NO: 1219 - protein, 7 aa, Artificial Sequence
  source: /note="Description of Artificial Sequence: Synthetic peptide"
SGGYYWS

SEQ ID NO: 1220 - protein, 5 aa, Artificial Sequence
  source: /note="Description of Artificial Sequence: Synthetic peptide"
SYAIS

SEQ ID NO: 1221 - protein, 7 aa, Artificial Sequence
  source: /note="Description of Artificial Sequence: Synthetic peptide"
SNSAAWN

SEQ ID NO: 1222 - protein, 5 aa, Artificial Sequence
  source: /note="Description of Artificial Sequence: Synthetic peptide"
SYAMS

SEQ ID NO: 1223 - protein, 5 aa, Artificial Sequence
  source: /note="Description of Artificial Sequence: Synthetic peptide"
RYPMS

SEQ ID NO: 1224 - protein, 5 aa, Artificial Sequence
  source: /note="Description of Artificial Sequence: Synthetic peptide"
SYAMS

SEQ ID NO: 1225 - protein, 5 aa, Artificial Sequence
  source: /note="Description of Artificial Sequence: Synthetic peptide"
SYAMS

SEQ ID NO: 1226 - protein, 5 aa, Artificial Sequence
  source: /note="Description of Artificial Sequence: Synthetic peptide"
DYAMH

SEQ ID NO: 1227 - protein, 5 aa, Artificial Sequence
  source: /note="Description of Artificial Sequence: Synthetic peptide"
DYAMH

SEQ ID NO: 1228 - protein, 5 aa, Artificial Sequence
  source: /note="Description of Artificial Sequence: Synthetic peptide"
SYAMS

SEQ ID NO: 1229 - protein, 5 aa, Artificial Sequence
  source: /note="Description of Artificial Sequence: Synthetic peptide"
SYAMS

SEQ ID NO: 1230 - protein, 5 aa, Artificial Sequence
  source: /note="Description of Artificial Sequence: Synthetic peptide"
SYAMS

SEQ ID NO: 1231 - protein, 5 aa, Artificial Sequence
  source: /note="Description of Artificial Sequence: Synthetic peptide"
SYAMS

SEQ ID NO: 1232 - protein, 5 aa, Artificial Sequence
  source: /note="Description of Artificial Sequence: Synthetic peptide"
SYAMS

SEQ ID NO: 1233 - protein, 5 aa, Artificial Sequence
  source: /note="Description of Artificial Sequence: Synthetic peptide"
SYAMS

SEQ ID NO: 1234 - protein, 5 aa, Artificial Sequence
  source: /note="Description of Artificial Sequence: Synthetic peptide"
SYAMS

SEQ ID NO: 1235 - protein, 5 aa, Artificial Sequence
  source: /note="Description of Artificial Sequence: Synthetic peptide"
NFGMN

SEQ ID NO: 1236 - protein, 5 aa, Artificial Sequence
  source: /note="Description of Artificial Sequence: Synthetic peptide"
DYSIN

SEQ ID NO: 1237 - protein, 5 aa, Artificial Sequence
  source: /note="Description of Artificial Sequence: Synthetic peptide"
HYSMN

SEQ ID NO: 1238 - protein, 5 aa, Artificial Sequence
  source: /note="Description of Artificial Sequence: Synthetic peptide"
HYSMN

SEQ ID NO: 1239 - protein, 16 aa, Artificial Sequence
  source: /note="Description of Artificial Sequence: Synthetic peptide"
GIVYSGSTYYAASVKG

SEQ ID NO: 1240 - protein, 17 aa, Artificial Sequence
  source: /note="Description of Artificial Sequence: Synthetic peptide"
GISRSGENTYYADSVKG

SEQ ID NO: 1241 - protein, 17 aa, Artificial Sequence
  source: /note="Description of Artificial Sequence: Synthetic peptide"
GISWNSGSIGYADSVKG

SEQ ID NO: 1242 - protein, 16 aa, Artificial Sequence
  source: /note="Description of Artificial Sequence: Synthetic peptide"
GIVYSGSTYYAASVKG

SEQ ID NO: 1243 - protein, 17 aa, Artificial Sequence
  source: /note="Description of Artificial Sequence: Synthetic peptide"
WINPKNNNTNYAQKFQG

SEQ ID NO: 1244 - protein, 17 aa, Artificial Sequence
  source: /note="Description of Artificial Sequence: Synthetic peptide"
VISGSGGTTYYADSVKG

SEQ ID NO: 1245 - protein, 17 aa, Artificial Sequence
  source: /note="Description of Artificial Sequence: Synthetic peptide"
WISAYNGNTNYAQKFQG

SEQ ID NO: 1246 - protein, 16 aa, Artificial Sequence
  source: /note="Description of Artificial Sequence: Synthetic peptide"
GIVYSGSTYYAASVKG

SEQ ID NO: 1247 - protein, 16 aa, Artificial Sequence
  source: /note="Description of Artificial Sequence: Synthetic peptide"
GIVYSGSTYYAASVKG

SEQ ID NO: 1248 - protein, 16 aa, Artificial Sequence
  source: /note="Description of Artificial Sequence: Synthetic peptide"
GIVYSGSTYYAASVKG

SEQ ID NO: 1249 - protein, 17 aa, Artificial Sequence
  source: /note="Description of Artificial Sequence: Synthetic peptide"
YISSSGSTIYYADSVKG

SEQ ID NO: 1250 - protein, 17 aa, Artificial Sequence
  source: /note="Description of Artificial Sequence: Synthetic peptide"
YISSSGNTIYYADSVKG

SEQ ID NO: 1251 - protein, 16 aa, Artificial Sequence
  source: /note="Description of Artificial Sequence: Synthetic peptide"
GIVYSGSTYYAASVKG

SEQ ID NO: 1252 - protein, 16 aa, Artificial Sequence
  source: /note="Description of Artificial Sequence: Synthetic peptide"
GIVYSGSTYYAASVKG

SEQ ID NO: 1253 - protein, 16 aa, Artificial Sequence
  source: /note="Description of Artificial Sequence: Synthetic peptide"
GIVYSGSTYYAASVKG

SEQ ID NO: 1254 - protein, 16 aa, Artificial Sequence
  source: /note="Description of Artificial Sequence: Synthetic peptide"
SIYYSGSAYYNPSLKS

SEQ ID NO: 1255 - protein, 16 aa, Artificial Sequence
  source: /note="Description of Artificial Sequence: Synthetic peptide"
RIDWDEDKFYSTSLKT

SEQ ID NO: 1256 - protein, 17 aa, Artificial Sequence
  source: /note="Description of Artificial Sequence: Synthetic peptide"
SISSSSSYIYYADSVKG

SEQ ID NO: 1257 - protein, 17 aa, Artificial Sequence
  source: /note="Description of Artificial Sequence: Synthetic peptide"
YISSSGSTIYYADSVKG

SEQ ID NO: 1258 - protein, 17 aa, Artificial Sequence
  source: /note="Description of Artificial Sequence: Synthetic peptide"
MINPSGGVTAYSQTLQG

SEQ ID NO: 1259 - protein, 16 aa, Artificial Sequence
  source: /note="Description of Artificial Sequence: Synthetic peptide"
YIYYSGSTYYNPSLKS

SEQ ID NO: 1260 - protein, 17 aa, Artificial Sequence
  source: /note="Description of Artificial Sequence: Synthetic peptide"
GIIPIFGTANYAQKFQG

SEQ ID NO: 1261 - protein, 18 aa, Artificial Sequence
  source: /note="Description of Artificial Sequence: Synthetic peptide"
RTYYRSKWYSFYAISLKS

SEQ ID NO: 1262 - protein, 17 aa, Artificial Sequence
  source: /note="Description of Artificial Sequence: Synthetic peptide"
AISGSGGSTYYADSVKG

SEQ ID NO: 1263 - protein, 17 aa, Artificial Sequence
  source: /note="Description of Artificial Sequence: Synthetic peptide"
GISDSGVSTYYADSAKG

SEQ ID NO: 1264 - protein, 17 aa, Artificial Sequence
  source: /note="Description of Artificial Sequence: Synthetic peptide"
AISGSGGSTYYADSVKG

SEQ ID NO: 1265 - protein, 17 aa, Artificial Sequence
  source: /note="Description of Artificial Sequence: Synthetic peptide"
AISGSGGSTYYADSVKG

SEQ ID NO: 1266 - protein, 17 aa, Artificial Sequence
  source: /note="Description of Artificial Sequence: Synthetic peptide"
GISWNSGSIGYADSVKG

SEQ ID NO: 1267 - protein, 17 aa, Artificial Sequence
  source: /note="Description of Artificial Sequence: Synthetic peptide"
SINWKGNSLAYGDSVKG

SEQ ID NO: 1268 - protein, 17 aa, Artificial Sequence
  source: /note="Description of Artificial Sequence: Synthetic peptide"
AISGSGGSTYYADSVKG

SEQ ID NO: 1269 - protein, 17 aa, Artificial Sequence
  source: /note="Description of Artificial Sequence: Synthetic peptide"
AISGSGGSTYYADSVKG

SEQ ID NO: 1270 - protein, 17 aa, Artificial Sequence
  source: /note="Description of Artificial Sequence: Synthetic peptide"
AISGSGGSTYYADSVKG

SEQ ID NO: 1271 - protein, 17 aa, Artificial Sequence
  source: /note="Description of Artificial Sequence: Synthetic peptide"
AISGSGGSTYYADSVKG

SEQ ID NO: 1272 - protein, 17 aa, Artificial Sequence
  source: /note="Description of Artificial Sequence: Synthetic peptide"
AISGSGGSTYYADSVKG

SEQ ID NO: 1273 - protein, 17 aa, Artificial Sequence
  source: /note="Description of Artificial Sequence: Synthetic peptide"
AISGSGGSTYYADSVKG

SEQ ID NO: 1274 - protein, 17 aa, Artificial Sequence
  source: /note="Description of Artificial Sequence: Synthetic peptide"
AISGSGGSTYYADSVKG

SEQ ID NO: 1275 - protein, 17 aa, Artificial Sequence
  source: /note="Description of Artificial Sequence: Synthetic peptide"
WINTYTGESYFADDFKG

SEQ ID NO: 1276 - protein, 17 aa, Artificial Sequence
  source: /note="Description of Artificial Sequence: Synthetic peptide"
WINTETREPAYAYDFRG

SEQ ID NO: 1277 - protein, 17 aa, Artificial Sequence
  source: /note="Description of Artificial Sequence: Synthetic peptide"
RINTESGVPIYADDFKG

SEQ ID NO: 1278 - protein, 17 aa, Artificial Sequence
  source: /note="Description of Artificial Sequence: Synthetic peptide"
RINTETGEPLYADDFKG

SEQ ID NO: 1279 - protein, 7 aa, Artificial Sequence
  source: /note="Description of Artificial Sequence: Synthetic peptide"
HGGESDV

SEQ ID NO: 1280 - protein, 11 aa, Artificial Sequence
  source: /note="Description of Artificial Sequence: Synthetic peptide"
SPAHYYGGMDV

SEQ ID NO: 1281 - protein, 6 aa, Artificial Sequence
  source: /note="Description of Artificial Sequence: Synthetic peptide"
HSFLAY

SEQ ID NO: 1282 - protein, 7 aa, Artificial Sequence
  source: /note="Description of Artificial Sequence: Synthetic peptide"
HGGESDV

SEQ ID NO: 1283 - protein, 11 aa, Artificial Sequence
  source: /note="Description of Artificial Sequence: Synthetic peptide"
GPYYYQSYMDV

SEQ ID NO: 1284 - protein, 14 aa, Artificial Sequence
  source: /note="Description of Artificial Sequence: Synthetic peptide"
LDSSGYYYARGPRY

SEQ ID NO: 1285 - protein, 9 aa, Artificial Sequence
  source: /note="Description of Artificial Sequence: Synthetic peptide"
GPYYYYMDV

SEQ ID NO: 1286 - protein, 7 aa, Artificial Sequence
  source: /note="Description of Artificial Sequence: Synthetic peptide"
HGGESDV

SEQ ID NO: 1287 - protein, 7 aa, Artificial Sequence
  source: /note="Description of Artificial Sequence: Synthetic peptide"
HGGESDV

SEQ ID NO: 1288 - protein, 7 aa, Artificial Sequence
  source: /note="Description of Artificial Sequence: Synthetic peptide"
HGGESDV

SEQ ID NO: 1289 - protein, 8 aa, Artificial Sequence
  source: /note="Description of Artificial Sequence: Synthetic peptide"
ESGDGMDV

SEQ ID NO: 1290 - protein, 8 aa, Artificial Sequence
  source: /note="Description of Artificial Sequence: Synthetic peptide"
STMVREDY

SEQ ID NO: 1291 - protein, 7 aa, Artificial Sequence
  source: /note="Description of Artificial Sequence: Synthetic peptide"
HGGESDV

SEQ ID NO: 1292 - protein, 7 aa, Artificial Sequence
  source: /note="Description of Artificial Sequence: Synthetic peptide"
HGGESDV

SEQ ID NO: 1293 - protein, 7 aa, Artificial Sequence
  source: /note="Description of Artificial Sequence: Synthetic peptide"
HGGESDV

SEQ ID NO: 1294 - protein, 11 aa, Artificial Sequence
  source: /note="Description of Artificial Sequence: Synthetic peptide"
HWQEWPDAFDI

SEQ ID NO: 1295 - protein, 13 aa, Artificial Sequence
  source: /note="Description of Artificial Sequence: Synthetic peptide"
SGAGGTSATAFDI

SEQ ID NO: 1296 - protein, 10 aa, Artificial Sequence
  source: /note="Description of Artificial Sequence: Synthetic peptide"
TIAAVYAFDI

SEQ ID NO: 1297 - protein, 8 aa, Artificial Sequence
  source: /note="Description of Artificial Sequence: Synthetic peptide"
DLRGAFDI

SEQ ID NO: 1298 - protein, 11 aa, Artificial Sequence
  source: /note="Description of Artificial Sequence: Synthetic peptide"
EGSGSGWYFDF

SEQ ID NO: 1299 - protein, 13 aa, Artificial Sequence
  source: /note="Description of Artificial Sequence: Synthetic peptide"
AGIAARLRGAFDI

SEQ ID NO: 1300 - protein, 20 aa, Artificial Sequence
  source: /note="Description of Artificial Sequence: Synthetic peptide"
RGGYQLLRWDVGLLRSAFDI

SEQ ID NO: 1301 - protein, 13 aa, Artificial Sequence
  source: /note="Description of Artificial Sequence: Synthetic peptide"
SSPEGLFLYWFDP

SEQ ID NO: 1302 - protein, 9 aa, Artificial Sequence
  source: /note="Description of Artificial Sequence: Synthetic peptide"
VEGSGSLDY

SEQ ID NO: 1303 - protein, 9 aa, Artificial Sequence
  source: /note="Description of Artificial Sequence: Synthetic peptide"
RAGSEASDI

SEQ ID NO: 1304 - protein, 15 aa, Artificial Sequence
  source: /note="Description of Artificial Sequence: Synthetic peptide"
ATYKRELRYYYGMDV

SEQ ID NO: 1305 - protein, 15 aa, Artificial Sequence
  source: /note="Description of Artificial Sequence: Synthetic peptide"
ATYKRELRYYYGMDV

SEQ ID NO: 1306 - protein, 8 aa, Artificial Sequence
  source: /note="Description of Artificial Sequence: Synthetic peptide"
VGKAVPDV

SEQ ID NO: 1307 - protein, 13 aa, Artificial Sequence
  source: /note="Description of Artificial Sequence: Synthetic peptide"
HQGVAYYNYAMDV

SEQ ID NO: 1308 - protein, 8 aa, Artificial Sequence
  source: /note="Description of Artificial Sequence: Synthetic peptide"
VVRDGMDV

SEQ ID NO: 1309 - protein, 9 aa, Artificial Sequence
  source: /note="Description of Artificial Sequence: Synthetic peptide"
IPQTGTFDY

SEQ ID NO: 1310 - protein, 15 aa, Artificial Sequence
  source: /note="Description of Artificial Sequence: Synthetic peptide"
ANYKRELRYYYGMDV

SEQ ID NO: 1311 - protein, 11 aa, Artificial Sequence
  source: /note="Description of Artificial Sequence: Synthetic peptide"
ALVGATGAFDI

SEQ ID NO: 1312 - protein, 8 aa, Artificial Sequence
  source: /note="Description of Artificial Sequence: Synthetic peptide"
WFGEGFDP

SEQ ID NO: 1313 - protein, 17 aa, Artificial Sequence
  source: /note="Description of Artificial Sequence: Synthetic peptide"
VGYDSSGYYRDYYGMDV

SEQ ID NO: 1314 - protein, 13 aa, Artificial Sequence
  source: /note="Description of Artificial Sequence: Synthetic peptide"
MGWSSGYLGAFDI

SEQ ID NO: 1315 - protein, 13 aa, Artificial Sequence
  source: /note="Description of Artificial Sequence: Synthetic peptide"
GEIYYGYDGGFAY

SEQ ID NO: 1316 - protein, 8 aa, Artificial Sequence
  source: /note="Description of Artificial Sequence: Synthetic peptide"
DYSYAMDY

SEQ ID NO: 1317 - protein, 8 aa, Artificial Sequence
  source: /note="Description of Artificial Sequence: Synthetic peptide"
DYLYSLDF

SEQ ID NO: 1318 - protein, 8 aa, Artificial Sequence
  source: /note="Description of Artificial Sequence: Synthetic peptide"
DYLYSCDY

SEQ ID NO: 1319 - protein, 11 aa, Artificial Sequence
  source: /note="Description of Artificial Sequence: Synthetic peptide"
RASQSISSYLN

SEQ ID NO: 1320 - protein, 12 aa, Artificial Sequence
  source: /note="Description of Artificial Sequence: Synthetic peptide"
RASQSISSSFLA

SEQ ID NO: 1321 - protein, 16 aa, Artificial Sequence
  source: /note="Description of Artificial Sequence: Synthetic peptide"
RSSQSLLHSNGYNYLD

SEQ ID NO: 1322 - protein, 16 aa, Artificial Sequence
  source: /note="Description of Artificial Sequence: Synthetic peptide"
KSSQSLLRNDGKTPLY

SEQ ID NO: 1323 - protein, 16 aa, Artificial Sequence
  source: /note="Description of Artificial Sequence: Synthetic peptide"
RSSQSLLHSNGYNYLN

SEQ ID NO: 1324 - protein, 11 aa, Artificial Sequence
  source: /note="Description of Artificial Sequence: Synthetic peptide"
RASQSISSYLN

SEQ ID NO: 1325 - protein, 16 aa, Artificial Sequence
  source: /note="Description of Artificial Sequence: Synthetic peptide"
RSSQSLLYSNGYNYVD

SEQ ID NO: 1326 - protein, 11 aa, Artificial Sequence
  source: /note="Description of Artificial Sequence: Synthetic peptide"
RASQSVSSNLA

SEQ ID NO: 1327 - protein, 11 aa, Artificial Sequence
  source: /note="Description of Artificial Sequence: Synthetic peptide"
RASQSVSSKLA

SEQ ID NO: 1328 - protein, 12 aa, Artificial Sequence
  source: /note="Description of Artificial Sequence: Synthetic peptide"
RASQSVGSTNLA

SEQ ID NO: 1329 - protein, 11 aa, Artificial Sequence
  source: /note="Description of Artificial Sequence: Synthetic peptide"
RASQSISSYLN

SEQ ID NO: 1330 - protein, 16 aa, Artificial Sequence
  source: /note="Description of Artificial Sequence: Synthetic peptide"
KSSESLVHNSGKTYLN

SEQ ID NO: 1331 - protein, 11 aa, Artificial Sequence
  source: /note="Description of Artificial Sequence: Synthetic peptide"
QASEDINKFLN

SEQ ID NO: 1332 - protein, 11 aa, Artificial Sequence
  source: /note="Description of Artificial Sequence: Synthetic peptide"
RASQSVGSNLA

SEQ ID NO: 1333 - protein, 12 aa, Artificial Sequence
  source: /note="Description of Artificial Sequence: Synthetic peptide"
RASQSIGSSSLA

SEQ ID NO: 1334 - protein, 11 aa, Artificial Sequence
  source: /note="Description of Artificial Sequence: Synthetic peptide"
KASQDIDDAMN

SEQ ID NO: 1335 - protein, 11 aa, Artificial Sequence
  source: /note="Description of Artificial Sequence: Synthetic peptide"
RASQDIYNNLA

SEQ ID NO: 1336 - protein, 16 aa, Artificial Sequence
  source: /note="Description of Artificial Sequence: Synthetic peptide"
RSSQSLLHSNGYNYLD

SEQ ID NO: 1337 - protein, 11 aa, Artificial Sequence
  source: /note="Description of Artificial Sequence: Synthetic peptide"
GGNNIGTKSVH

SEQ ID NO: 1338 - protein, 11 aa, Artificial Sequence
  source: /note="Description of Artificial Sequence: Synthetic peptide"
SGDGLSKKYVS

SEQ ID NO: 1339 - protein, 11 aa, Artificial Sequence
  source: /note="Description of Artificial Sequence: Synthetic peptide"
RASQGIRNWLA

SEQ ID NO: 1340 - protein, 11 aa, Artificial Sequence
  source: /note="Description of Artificial Sequence: Synthetic peptide"
GGNNIGSKSVH

SEQ ID NO: 1341 - protein, 11 aa, Artificial Sequence
  source: /note="Description of Artificial Sequence: Synthetic peptide"
QGDSLGNYYAT

SEQ ID NO: 1342 - protein, 12 aa, Artificial Sequence
  source: /note="Description of Artificial Sequence: Synthetic peptide"
RASQSVSSAYLA

SEQ ID NO: 1343 - protein, 11 aa, Artificial Sequence
  source: /note="Description of Artificial Sequence: Synthetic peptide"
RASQSVSNSLA

SEQ ID NO: 1344 - protein, 12 aa, Artificial Sequence
  source: /note="Description of Artificial Sequence: Synthetic peptide"
RASQSVSSSFLA

SEQ ID NO: 1345 - protein, 12 aa, Artificial Sequence
  source: /note="Description of Artificial Sequence: Synthetic peptide"
RASQSVSTTFLA

SEQ ID NO: 1346 - protein, 11 aa, Artificial Sequence
  source: /note="Description of Artificial Sequence: Synthetic peptide"
RASQSISSYLN

SEQ ID NO: 1347 - protein, 12 aa, Artificial Sequence
  source: /note="Description of Artificial Sequence: Synthetic peptide"
RATQSIGSSFLA

SEQ ID NO: 1348 - protein, 12 aa, Artificial Sequence
  source: /note="Description of Artificial Sequence: Synthetic peptide"
RASQSVSSSYLA

SEQ ID NO: 1349 - protein, 12 aa, Artificial Sequence
  source: /note="Description of Artificial Sequence: Synthetic peptide"
RASQSVSSSYLA

SEQ ID NO: 1350 - protein, 12 aa, Artificial Sequence
  source: /note="Description of Artificial Sequence: Synthetic peptide"
RASQRVASNYLA

SEQ ID NO: 1351 - protein, 12 aa, Artificial Sequence
  source: /note="Description of Artificial Sequence: Synthetic peptide"
RASQSLSSNFLA

SEQ ID NO: 1352 - protein, 16 aa, Artificial Sequence
  source: /note="Description of Artificial Sequence: Synthetic peptide"
RSSQSLLHSNGYNYLD

SEQ ID NO: 1353 - protein, 12 aa, Artificial Sequence
  source: /note="Description of Artificial Sequence: Synthetic peptide"
RASQSVSSSYLA

SEQ ID NO: 1354 - protein, 12 aa, Artificial Sequence
  source: /note="Description of Artificial Sequence: Synthetic peptide"
RASQSVASSFLA

SEQ ID NO: 1355 - protein, 11 aa, Artificial Sequence
  source: /note="Description of Artificial Sequence: Synthetic peptide"
RASQDVNTAVS

SEQ ID NO: 1356 - protein, 15 aa, Artificial Sequence
  source: /note="Description of Artificial Sequence: Synthetic peptide"
RASESVSVIGAHLIH

SEQ ID NO: 1357 - protein, 15 aa, Artificial Sequence
  source: /note="Description of Artificial Sequence: Synthetic peptide"
RASESVTILGSHLIY

SEQ ID NO: 1358 - protein, 15 aa, Artificial Sequence
  source: /note="Description of Artificial Sequence: Synthetic peptide"
RASESVTILGSHLIY

SEQ ID NO: 1359 - protein, 7 aa, Artificial Sequence
  source: /note="Description of Artificial Sequence: Synthetic peptide"
AASSLQS

SEQ ID NO: 1360 - protein, 7 aa, Artificial Sequence
  source: /note="Description of Artificial Sequence: Synthetic peptide"
GASRRAT

SEQ ID NO: 1361 - protein, 7 aa, Artificial Sequence
  source: /note="Description of Artificial Sequence: Synthetic peptide"
LGSNRAS

SEQ ID NO: 1362 - protein, 7 aa, Artificial Sequence
  source: /note="Description of Artificial Sequence: Synthetic peptide"
EVSNRFS

SEQ ID NO: 1363 - protein, 7 aa, Artificial Sequence
  source: /note="Description of Artificial Sequence: Synthetic peptide"
LGSKRAS

SEQ ID NO: 1364 - protein, 7 aa, Artificial Sequence
  source: /note="Description of Artificial Sequence: Synthetic peptide"
GASTLAS

SEQ ID NO: 1365 - protein, 7 aa, Artificial Sequence
  source: /note="Description of Artificial Sequence: Synthetic peptide"
LGSNRAS

SEQ ID NO: 1366 - protein, 7 aa, Artificial Sequence
  source: /note="Description of Artificial Sequence: Synthetic peptide"
GASTRAS

SEQ ID NO: 1367 - protein, 7 aa, Artificial Sequence
  source: /note="Description of Artificial Sequence: Synthetic peptide"
GASIRAT

SEQ ID NO: 1368 - protein, 7 aa, Artificial Sequence
  source: /note="Description of Artificial Sequence: Synthetic peptide"
DASNRAT

SEQ ID NO: 1369 - protein, 7 aa, Artificial Sequence
  source: /note="Description of Artificial Sequence: Synthetic peptide"
AASSLQS

SEQ ID NO: 1370 - protein, 7 aa, Artificial Sequence
  source: /note="Description of Artificial Sequence: Synthetic peptide"
EVSNRDS

SEQ ID NO: 1371 - protein, 7 aa, Artificial Sequence
  source: /note="Description of Artificial Sequence: Synthetic peptide"
DASTLQT

SEQ ID NO: 1372 - protein, 7 aa, Artificial Sequence
  source: /note="Description of Artificial Sequence: Synthetic peptide"
GASTRAT

SEQ ID NO: 1373 - protein, 7 aa, Artificial Sequence
  source: /note="Description of Artificial Sequence: Synthetic peptide"
GASSRAS

SEQ ID NO: 1374 - protein, 7 aa, Artificial Sequence
  source: /note="Description of Artificial Sequence: Synthetic peptide"
SATSPVP

SEQ ID NO: 1375 - protein, 7 aa, Artificial Sequence
  source: /note="Description of Artificial Sequence: Synthetic peptide"
AANKSQS

SEQ ID NO: 1376 - protein, 7 aa, Artificial Sequence
  source: /note="Description of Artificial Sequence: Synthetic peptide"
LGSNRAS

SEQ ID NO: 1377 - protein, 7 aa, Artificial Sequence
  source: /note="Description of Artificial Sequence: Synthetic peptide"
DDSVRPS

SEQ ID NO: 1378 - protein, 7 aa, Artificial Sequence
  source: /note="Description of Artificial Sequence: Synthetic peptide"
RDKERPS

SEQ ID NO: 1379 - protein, 7 aa, Artificial Sequence
  source: /note="Description of Artificial Sequence: Synthetic peptide"
AASNLQS

SEQ ID NO: 1380 - protein, 7 aa, Artificial Sequence
  source: /note="Description of Artificial Sequence: Synthetic peptide"
GKNNRPS

SEQ ID NO: 1381 - protein, 7 aa, Artificial Sequence
  source: /note="Description of Artificial Sequence: Synthetic peptide"
GTNNRPS

SEQ ID NO: 1382 - protein, 7 aa, Artificial Sequence
  source: /note="Description of Artificial Sequence: Synthetic peptide"
GASTRAT

SEQ ID NO: 1383 - protein, 7 aa, Artificial Sequence
  source: /note="Description of Artificial Sequence: Synthetic peptide"
DASSRAT

SEQ ID NO: 1384 - protein, 7 aa, Artificial Sequence
  source: /note="Description of Artificial Sequence: Synthetic peptide"
GASSRAT

SEQ ID NO: 1385 - protein, 7 aa, Artificial Sequence
  source: /note="Description of Artificial Sequence: Synthetic peptide"
GSSNRAT

SEQ ID NO: 1386 - protein, 7 aa, Artificial Sequence
  source: /note="Description of Artificial Sequence: Synthetic peptide"
AASSLQS

SEQ ID NO: 1387 - protein, 7 aa, Artificial Sequence
  source: /note="Description of Artificial Sequence: Synthetic peptide"
GASQRAT

SEQ ID NO: 1388 - protein, 7 aa, Artificial Sequence
  source: /note="Description of Artificial Sequence: Synthetic peptide"
GASSRAT

SEQ ID NO: 1389 - protein, 7 aa, Artificial Sequence
  source: /note="Description of Artificial Sequence: Synthetic peptide"
GASSRAT

SEQ ID NO: 1390 - protein, 7 aa, Artificial Sequence
  source: /note="Description of Artificial Sequence: Synthetic peptide"
GASSRAT

SEQ ID NO: 1391 - protein, 7 aa, Artificial Sequence
  source: /note="Description of Artificial Sequence: Synthetic peptide"
GASNWAT

SEQ ID NO: 1392 - protein, 7 aa, Artificial Sequence
  source: /note="Description of Artificial Sequence: Synthetic peptide"
LGSNRAS

SEQ ID NO: 1393 - protein, 7 aa, Artificial Sequence
  source: /note="Description of Artificial Sequence: Synthetic peptide"
GTSSRAT

SEQ ID NO: 1394 - protein, 7 aa, Artificial Sequence
  source: /note="Description of Artificial Sequence: Synthetic peptide"
GASGRAT

SEQ ID NO: 1395 - protein, 7 aa, Artificial Sequence
  source: /note="Description of Artificial Sequence: Synthetic peptide"
SASYRYT

SEQ ID NO: 1396 - protein, 7 aa, Artificial Sequence
  source: /note="Description of Artificial Sequence: Synthetic peptide"
LASNLET

SEQ ID NO: 1397 - protein, 7 aa, Artificial Sequence
  source: /note="Description of Artificial Sequence: Synthetic peptide"
LASNVQT

SEQ ID NO: 1398 - protein, 7 aa, Artificial Sequence
  source: /note="Description of Artificial Sequence: Synthetic peptide"
LASNVQT

SEQ ID NO: 1399 - protein, 9 aa, Artificial Sequence
  source: /note="Description of Artificial Sequence: Synthetic peptide"
QQSYSTPYT

SEQ ID NO: 1400 - protein, 10 aa, Artificial Sequence
  source: /note="Description of Artificial Sequence: Synthetic peptide"
QQYHSSPSWT

SEQ ID NO: 1401 - protein, 9 aa, Artificial Sequence
  source: /note="Description of Artificial Sequence: Synthetic peptide"
MQALQTPYT

SEQ ID NO: 1402 - protein, 8 aa, Artificial Sequence
  source: /note="Description of Artificial Sequence: Synthetic peptide"
MQNIQFPS

SEQ ID NO: 1403 - protein, 9 aa, Artificial Sequence
  source: /note="Description of Artificial Sequence: Synthetic peptide"
MQALQTPYT

SEQ ID NO: 1404 - protein, 8 aa, Artificial Sequence
  source: /note="Description of Artificial Sequence: Synthetic peptide"
QQSYKRAS

SEQ ID NO: 1405 - protein, 9 aa, Artificial Sequence
  source: /note="Description of Artificial Sequence: Synthetic peptide"
MQGRQFPYS

SEQ ID NO: 1406 - protein, 8 aa, Artificial Sequence
  source: /note="Description of Artificial Sequence: Synthetic peptide"
QQYGSSLT

SEQ ID NO: 1407 - protein, 9 aa, Artificial Sequence
  source: /note="Description of Artificial Sequence: Synthetic peptide"
QQYGSSSWT

SEQ ID NO: 1408 - protein, 10 aa, Artificial Sequence
  source: /note="Description of Artificial Sequence: Synthetic peptide"
QQYGSSPPWT

SEQ ID NO: 1409 - protein, 7 aa, Artificial Sequence
  source: /note="Description of Artificial Sequence: Synthetic peptide"
QQSYTLA

SEQ ID NO: 1410 - protein, 9 aa, Artificial Sequence
  source: /note="Description of Artificial Sequence: Synthetic peptide"
MQGTHWPGT

SEQ ID NO: 1411 - protein, 9 aa, Artificial Sequence
  source: /note="Description of Artificial Sequence: Synthetic peptide"
QQYESLPLT

SEQ ID NO: 1412 - protein, 10 aa, Artificial Sequence
  source: /note="Description of Artificial Sequence: Synthetic peptide"
QQYNDWLPVT

SEQ ID NO: 1413 - protein, 10 aa, Artificial Sequence
  source: /note="Description of Artificial Sequence: Synthetic peptide"
QQYAGSPPFT

SEQ ID NO: 1414 - protein, 9 aa, Artificial Sequence
  source: /note="Description of Artificial Sequence: Synthetic peptide"
LQHDNFPLT

SEQ ID NO: 1415 - protein, 9 aa, Artificial Sequence
  source: /note="Description of Artificial Sequence: Synthetic peptide"
QHYYRFPYS

SEQ ID NO: 1416 - protein, 9 aa, Artificial Sequence
  source: /note="Description of Artificial Sequence: Synthetic peptide"
MQALQTPYT

SEQ ID NO: 1417 - protein, 11 aa, Artificial Sequence
  source: /note="Description of Artificial Sequence: Synthetic peptide"
QVWDSDSEHVV

SEQ ID NO: 1418 - protein, 9 aa, Artificial Sequence
  source: /note="Description of Artificial Sequence: Synthetic peptide"
QAWDDTTVV

SEQ ID NO: 1419 - protein, 9 aa, Artificial Sequence
  source: /note="Description of Artificial Sequence: Synthetic peptide"
QKYNSAPFT

SEQ ID NO: 1420 - protein, 12 aa, Artificial Sequence
  source: /note="Description of Artificial Sequence: Synthetic peptide"
SSRDSSGDHLRV

SEQ ID NO: 1421 - protein, 11 aa, Artificial Sequence
  source: /note="Description of Artificial Sequence: Synthetic peptide"
NSRDSSGHHLL

SEQ ID NO: 1422 - protein, 14 aa, Artificial Sequence
  source: /note="Description of Artificial Sequence: Synthetic peptide"
QHYGSSFNGSSLFT

SEQ ID NO: 1423 - protein, 10 aa, Artificial Sequence
  source: /note="Description of Artificial Sequence: Synthetic peptide"
QQFGTSSGLT

SEQ ID NO: 1424 - protein, 10 aa, Artificial Sequence
  source: /note="Description of Artificial Sequence: Synthetic peptide"
QQYHSSPSWT

SEQ ID NO: 1425 - protein, 10 aa, Artificial Sequence
  source: /note="Description of Artificial Sequence: Synthetic peptide"
QQYHSSPSWT

SEQ ID NO: 1426 - protein, 9 aa, Artificial Sequence
  source: /note="Description of Artificial Sequence: Synthetic peptide"
QQSYSTPYS

SEQ ID NO: 1427 - protein, 10 aa, Artificial Sequence
  source: /note="Description of Artificial Sequence: Synthetic peptide"
QHYESSPSWT

SEQ ID NO: 1428 - protein, 10 aa, Artificial Sequence
  source: /note="Description of Artificial Sequence: Synthetic peptide"
QQYGSPPRFT

SEQ ID NO: 1429 - protein, 10 aa, Artificial Sequence
  source: /note="Description of Artificial Sequence: Synthetic peptide"
QHYGSSPSWT

SEQ ID NO: 1430 - protein, 10 aa, Artificial Sequence
  source: /note="Description of Artificial Sequence: Synthetic peptide"
QHYDSSPSWT

SEQ ID NO: 1431 - protein, 10 aa, Artificial Sequence
  source: /note="Description of Artificial Sequence: Synthetic peptide"
QYYGTSPMYT

SEQ ID NO: 1432 - protein, 9 aa, Artificial Sequence
  source: /note="Description of Artificial Sequence: Synthetic peptide"
MQALQTPLT

SEQ ID NO: 1433 - protein, 11 aa, Artificial Sequence
  source: /note="Description of Artificial Sequence: Synthetic peptide"
QHYGNSPPKFT

SEQ ID NO: 1434 - protein, 10 aa, Artificial Sequence
  source: /note="Description of Artificial Sequence: Synthetic peptide"
QHYGGSPRLT

SEQ ID NO: 1435 - protein, 9 aa, Artificial Sequence
  source: /note="Description of Artificial Sequence: Synthetic peptide"
QQHYSTPWT

SEQ ID NO: 1436 - protein, 9 aa, Artificial Sequence
  source: /note="Description of Artificial Sequence: Synthetic peptide"
LQSRIFPRT

SEQ ID NO: 1437 - protein, 9 aa, Artificial Sequence
  source: /note="Description of Artificial Sequence: Synthetic peptide"
LQSRTIPRT

SEQ ID NO: 1438 - protein, 9 aa, Artificial Sequence
  source: /note="Description of Artificial Sequence: Synthetic peptide"
LQSRTIPRT

SEQ ID NO: 1439 - protein, 7 aa, Artificial Sequence
  source: /note="Description of Artificial Sequence: Synthetic peptide"
GFALSNH

SEQ ID NO: 1440 - protein, 7 aa, Artificial Sequence
  source: /note="Description of Artificial Sequence: Synthetic peptide"
GFTFSNY

SEQ ID NO: 1441 - protein, 7 aa, Artificial Sequence
  source: /note="Description of Artificial Sequence: Synthetic peptide"
GFTFDDY

SEQ ID NO: 1442 - protein, 7 aa, Artificial Sequence
  source: /note="Description of Artificial Sequence: Synthetic peptide"
GFALSNH

SEQ ID NO: 1443 - protein, 7 aa, Artificial Sequence
  source: /note="Description of Artificial Sequence: Synthetic peptide"
GYIFDNF

SEQ ID NO: 1444 - protein, 7 aa, Artificial Sequence
  source: /note="Description of Artificial Sequence: Synthetic peptide"
GFTFSSD

SEQ ID NO: 1445 - protein, 7 aa, Artificial Sequence
  source: /note="Description of Artificial Sequence: Synthetic peptide"
GYTFSNY

SEQ ID NO: 1446 - protein, 7 aa, Artificial Sequence
  source: /note="Description of Artificial Sequence: Synthetic peptide"
GFALSNH

SEQ ID NO: 1447 - protein, 7 aa, Artificial Sequence
  source: /note="Description of Artificial Sequence: Synthetic peptide"
GFALSNH

SEQ ID NO: 1448 - protein, 7 aa, Artificial Sequence
  source: /note="Description of Artificial Sequence: Synthetic peptide"
GFALSNH

SEQ ID NO: 1449 - protein, 7 aa, Artificial Sequence
  source: /note="Description of Artificial Sequence: Synthetic peptide"
GFTFSDY

SEQ ID NO: 1450 - protein, 7 aa, Artificial Sequence
  source: /note="Description of Artificial Sequence: Synthetic peptide"
GFTFSDY

SEQ ID NO: 1451 - protein, 7 aa, Artificial Sequence
  source: /note="Description of Artificial Sequence: Synthetic peptide"
GFALSNH

SEQ ID NO: 1452 - protein, 7 aa, Artificial Sequence
  source: /note="Description of Artificial Sequence: Synthetic peptide"
GFALSNH

SEQ ID NO: 1453 - protein, 7 aa, Artificial Sequence
  source: /note="Description of Artificial Sequence: Synthetic peptide"
GFALSNH

SEQ ID NO: 1454 - protein, 9 aa, Artificial Sequence
  source: /note="Description of Artificial Sequence: Synthetic peptide"
GGSISSSYY

SEQ ID NO: 1455 - protein, 9 aa, Artificial Sequence
  source: /note="Description of Artificial Sequence: Synthetic peptide"
GFSLRTSGM

SEQ ID NO: 1456 - protein, 7 aa, Artificial Sequence
  source: /note="Description of Artificial Sequence: Synthetic peptide"
GFTFSSY

SEQ ID NO: 1457 - protein, 7 aa, Artificial Sequence
  source: /note="Description of Artificial Sequence: Synthetic peptide"
GFTFSDY

SEQ ID NO: 1458 - protein, 7 aa, Artificial Sequence
  source: /note="Description of Artificial Sequence: Synthetic peptide"
GYTVTSH

SEQ ID NO: 1459 - protein, 9 aa, Artificial Sequence
  source: /note="Description of Artificial Sequence: Synthetic peptide"
GGSISSGGY

SEQ ID NO: 1460 - protein, 7 aa, Artificial Sequence
  source: /note="Description of Artificial Sequence: Synthetic peptide"
GGTFSSY

SEQ ID NO: 1461 - protein, 9 aa, Artificial Sequence
  source: /note="Description of Artificial Sequence: Synthetic peptide"
GDSVSSNSA

SEQ ID NO: 1462 - protein, 7 aa, Artificial Sequence
  source: /note="Description of Artificial Sequence: Synthetic peptide"
GFTFSSY

SEQ ID NO: 1463 - protein, 7 aa, Artificial Sequence
  source: /note="Description of Artificial Sequence: Synthetic peptide"
GITFSRY

SEQ ID NO: 1464 - protein, 7 aa, Artificial Sequence
  source: /note="Description of Artificial Sequence: Synthetic peptide"
GFTFSSY

SEQ ID NO: 1465 - protein, 7 aa, Artificial Sequence
  source: /note="Description of Artificial Sequence: Synthetic peptide"
GFTFSSY

SEQ ID NO: 1466 - protein, 7 aa, Artificial Sequence
  source: /note="Description of Artificial Sequence: Synthetic peptide"
GFTFDDY

SEQ ID NO: 1467 - protein, 7 aa, Artificial Sequence
  source: /note="Description of Artificial Sequence: Synthetic peptide"
GFTFDDY

SEQ ID NO: 1468 - protein, 7 aa, Artificial Sequence
  source: /note="Description of Artificial Sequence: Synthetic peptide"
GFTFSSY

SEQ ID NO: 1469 - protein, 7 aa, Artificial Sequence
  source: /note="Description of Artificial Sequence: Synthetic peptide"
GFTFSSY

SEQ ID NO: 1470 - protein, 7 aa, Artificial Sequence
  source: /note="Description of Artificial Sequence: Synthetic peptide"
GFTFSSY

SEQ ID NO: 1471 - protein, 7 aa, Artificial Sequence
  source: /note="Description of Artificial Sequence: Synthetic peptide"
GFSFSSY

SEQ ID NO: 1472 - protein, 7 aa, Artificial Sequence
  source: /note="Description of Artificial Sequence: Synthetic peptide"
GFTFSSY

SEQ ID NO: 1473 - protein, 7 aa, Artificial Sequence
  source: /note="Description of Artificial Sequence: Synthetic peptide"
GFTFSSY

SEQ ID NO: 1474 - protein, 7 aa, Artificial Sequence
  source: /note="Description of Artificial Sequence: Synthetic peptide"
GFTFSSY

SEQ ID NO: 1475 - protein, 7 aa, Artificial Sequence
  source: /note="Description of Artificial Sequence: Synthetic peptide"
GYTFTNF

SEQ ID NO: 1476 - protein, 7 aa, Artificial Sequence
  source: /note="Description of Artificial Sequence: Synthetic peptide"
GYTFTDY

SEQ ID NO: 1477 - protein, 7 aa, Artificial Sequence
  source: /note="Description of Artificial Sequence: Synthetic peptide"
GYTFRHY

SEQ ID NO: 1478 - protein, 7 aa, Artificial Sequence
  source: /note="Description of Artificial Sequence: Synthetic peptide"
GYTFTHY

SEQ ID NO: 1479 - protein, 5 aa, Artificial Sequence
  source: /note="Description of Artificial Sequence: Synthetic peptide"
VYSGS

SEQ ID NO: 1480 - protein, 6 aa, Artificial Sequence
  source: /note="Description of Artificial Sequence: Synthetic peptide"
SRSGEN

SEQ ID NO: 1481 - protein, 6 aa, Artificial Sequence
  source: /note="Description of Artificial Sequence: Synthetic peptide"
SWNSGS

SEQ ID NO: 1482 - protein, 5 aa, Artificial Sequence
  source: /note="Description of Artificial Sequence: Synthetic peptide"
VYSGS

SEQ ID NO: 1483 - protein, 6 aa, Artificial Sequence
  source: /note="Description of Artificial Sequence: Synthetic peptide"
NPKNNN

SEQ ID NO: 1484 - protein, 6 aa, Artificial Sequence
  source: /note="Description of Artificial Sequence: Synthetic peptide"
SGSGGT

SEQ ID NO: 1485 - protein, 6 aa, Artificial Sequence
  source: /note="Description of Artificial Sequence: Synthetic peptide"
SAYNGN

SEQ ID NO: 1486 - protein, 5 aa, Artificial Sequence
  source: /note="Description of Artificial Sequence: Synthetic peptide"
VYSGS

SEQ ID NO: 1487 - protein, 5 aa, Artificial Sequence
  source: /note="Description of Artificial Sequence: Synthetic peptide"
VYSGS

SEQ ID NO: 1488 - protein, 5 aa, Artificial Sequence
  source: /note="Description of Artificial Sequence: Synthetic peptide"
VYSGS

SEQ ID NO: 1489 - protein, 6 aa, Artificial Sequence
  source: /note="Description of Artificial Sequence: Synthetic peptide"
SSSGST

SEQ ID NO: 1490 - protein, 6 aa, Artificial Sequence
  source: /note="Description of Artificial Sequence: Synthetic peptide"
SSSGNT

SEQ ID NO: 1491 - protein, 5 aa, Artificial Sequence
  source: /note="Description of Artificial Sequence: Synthetic peptide"
VYSGS

SEQ ID NO: 1492 - protein, 5 aa, Artificial Sequence
  source: /note="Description of Artificial Sequence: Synthetic peptide"
VYSGS

SEQ ID NO: 1493 - protein, 5 aa, Artificial Sequence
  source: /note="Description of Artificial Sequence: Synthetic peptide"
VYSGS

SEQ ID NO: 1494 - protein, 5 aa, Artificial Sequence
  source: /note="Description of Artificial Sequence: Synthetic peptide"
YYSGS

SEQ ID NO: 1495 - protein, 5 aa, Artificial Sequence
  source: /note="Description of Artificial Sequence: Synthetic peptide"
DWDED

SEQ ID NO: 1496 - protein, 6 aa, Artificial Sequence
  source: /note="Description of Artificial Sequence: Synthetic peptide"
SSSSSY

SEQ ID NO: 1497 - protein, 6 aa, Artificial Sequence
  source: /note="Description of Artificial Sequence: Synthetic peptide"
SSSGST

SEQ ID NO: 1498 - protein, 6 aa, Artificial Sequence
  source: /note="Description of Artificial Sequence: Synthetic peptide"
NPSGGV

SEQ ID NO: 1499 - protein, 5 aa, Artificial Sequence
  source: /note="Description of Artificial Sequence: Synthetic peptide"
YYSGS

SEQ ID NO: 1500 - protein, 6 aa, Artificial Sequence
  source: /note="Description of Artificial Sequence: Synthetic peptide"
IPIFGT

SEQ ID NO: 1501 - protein, 7 aa, Artificial Sequence
  source: /note="Description of Artificial Sequence: Synthetic peptide"
YYRSKWY

SEQ ID NO: 1502 - protein, 6 aa, Artificial Sequence
  source: /note="Description of Artificial Sequence: Synthetic peptide"
SGSGGS

SEQ ID NO: 1503 - protein, 6 aa, Artificial Sequence
  source: /note="Description of Artificial Sequence: Synthetic peptide"
SDSGVS

SEQ ID NO: 1504 - protein, 6 aa, Artificial Sequence
  source: /note="Description of Artificial Sequence: Synthetic peptide"
SGSGGS

SEQ ID NO: 1505 - protein, 6 aa, Artificial Sequence
  source: /note="Description of Artificial Sequence: Synthetic peptide"
SGSGGS

SEQ ID NO: 1506 - protein, 6 aa, Artificial Sequence
  source: /note="Description of Artificial Sequence: Synthetic peptide"
SWNSGS

SEQ ID NO: 1507 - protein, 6 aa, Artificial Sequence
  source: /note="Description of Artificial Sequence: Synthetic peptide"
NWKGNS

SEQ ID NO: 1508 - protein, 6 aa, Artificial Sequence
  source: /note="Description of Artificial Sequence: Synthetic peptide"
SGSGGS

SEQ ID NO: 1509 - protein, 6 aa, Artificial Sequence
  source: /note="Description of Artificial Sequence: Synthetic peptide"
SGSGGS

SEQ ID NO: 1510 - protein, 6 aa, Artificial Sequence
  source: /note="Description of Artificial Sequence: Synthetic peptide"
SGSGGS

SEQ ID NO: 1511 - protein, 6 aa, Artificial Sequence
  source: /note="Description of Artificial Sequence: Synthetic peptide"
SGSGGS

SEQ ID NO: 1512 - protein, 6 aa, Artificial Sequence
  source: /note="Description of Artificial Sequence: Synthetic peptide"
SGSGGS

SEQ ID NO: 1513 - protein, 6 aa, Artificial Sequence
  source: /note="Description of Artificial Sequence: Synthetic peptide"
SGSGGS

SEQ ID NO: 1514 - protein, 6 aa, Artificial Sequence
  source: /note="Description of Artificial Sequence: Synthetic peptide"
SGSGGS

SEQ ID NO: 1515 - protein, 6 aa, Artificial Sequence
  source: /note="Description of Artificial Sequence: Synthetic peptide"
NTYTGE

SEQ ID NO: 1516 - protein, 6 aa, Artificial Sequence
  source: /note="Description of Artificial Sequence: Synthetic peptide"
NTETRE

SEQ ID NO: 1517 - protein, 6 aa, Artificial Sequence
  source: /note="Description of Artificial Sequence: Synthetic peptide"
NTESGV

SEQ ID NO: 1518 - protein, 6 aa, Artificial Sequence
  source: /note="Description of Artificial Sequence: Synthetic peptide"
NTETGE

SEQ ID NO: 1519 - protein, 7 aa, Artificial Sequence
  source: /note="Description of Artificial Sequence: Synthetic peptide"
HGGESDV

SEQ ID NO: 1520 - protein, 11 aa, Artificial Sequence
  source: /note="Description of Artificial Sequence: Synthetic peptide"
SPAHYYGGMDV

SEQ ID NO: 1521 - protein, 6 aa, Artificial Sequence
  source: /note="Description of Artificial Sequence: Synthetic peptide"
HSFLAY

SEQ ID NO: 1522 - protein, 7 aa, Artificial Sequence
  source: /note="Description of Artificial Sequence: Synthetic peptide"
HGGESDV

SEQ ID NO: 1523 - protein, 11 aa, Artificial Sequence
  source: /note="Description of Artificial Sequence: Synthetic peptide"
GPYYYQSYMDV

SEQ ID NO: 1524 - protein, 14 aa, Artificial Sequence
  source: /note="Description of Artificial Sequence: Synthetic peptide"
LDSSGYYYARGPRY

SEQ ID NO: 1525 - protein, 9 aa, Artificial Sequence
  source: /note="Description of Artificial Sequence: Synthetic peptide"
GPYYYYMDV

SEQ ID NO: 1526 - protein, 7 aa, Artificial Sequence
  source: /note="Description of Artificial Sequence: Synthetic peptide"
HGGESDV

SEQ ID NO: 1527 - protein, 7 aa, Artificial Sequence
  source: /note="Description of Artificial Sequence: Synthetic peptide"
HGGESDV

SEQ ID NO: 1528 - protein, 7 aa, Artificial Sequence
  source: /note="Description of Artificial Sequence: Synthetic peptide"
HGGESDV

SEQ ID NO: 1529 - protein, 8 aa, Artificial Sequence
  source: /note="Description of Artificial Sequence: Synthetic peptide"
ESGDGMDV

SEQ ID NO: 1530 - protein, 8 aa, Artificial Sequence
  source: /note="Description of Artificial Sequence: Synthetic peptide"
STMVREDY

SEQ ID NO: 1531 - protein, 7 aa, Artificial Sequence
  source: /note="Description of Artificial Sequence: Synthetic peptide"
HGGESDV

SEQ ID NO: 1532 - protein, 7 aa, Artificial Sequence
  source: /note="Description of Artificial Sequence: Synthetic peptide"
HGGESDV

SEQ ID NO: 1533 - protein, 7 aa, Artificial Sequence
  source: /note="Description of Artificial Sequence: Synthetic peptide"
HGGESDV

SEQ ID NO: 1534 - protein, 11 aa, Artificial Sequence
  source: /note="Description of Artificial Sequence: Synthetic peptide"
HWQEWPDAFDI

SEQ ID NO: 1535 - protein, 13 aa, Artificial Sequence
  source: /note="Description of Artificial Sequence: Synthetic peptide"
SGAGGTSATAFDI

SEQ ID NO: 1536 - protein, 10 aa, Artificial Sequence
  source: /note="Description of Artificial Sequence: Synthetic peptide"
TIAAVYAFDI

SEQ ID NO: 1537 - protein, 8 aa, Artificial Sequence
  source: /note="Description of Artificial Sequence: Synthetic peptide"
DLRGAFDI

SEQ ID NO: 1538 - protein, 11 aa, Artificial Sequence
  source: /note="Description of Artificial Sequence: Synthetic peptide"
EGSGSGWYFDF

SEQ ID NO: 1539 - protein, 13 aa, Artificial Sequence
  source: /note="Description of Artificial Sequence: Synthetic peptide"
AGIAARLRGAFDI

SEQ ID NO: 1540 - protein, 20 aa, Artificial Sequence
  source: /note="Description of Artificial Sequence: Synthetic peptide"
RGGYQLLRWDVGLLRSAFDI

SEQ ID NO: 1541 - protein, 13 aa, Artificial Sequence
  source: /note="Description of Artificial Sequence: Synthetic peptide"
SSPEGLFLYWFDP

SEQ ID NO: 1542 - protein, 9 aa, Artificial Sequence
  source: /note="Description of Artificial Sequence: Synthetic peptide"
VEGSGSLDY

SEQ ID NO: 1543 - protein, 9 aa, Artificial Sequence
  source: /note="Description of Artificial Sequence: Synthetic peptide"
RAGSEASDI

SEQ ID NO: 1544 - protein, 15 aa, Artificial Sequence
  source: /note="Description of Artificial Sequence: Synthetic peptide"
ATYKRELRYYYGMDV

SEQ ID NO: 1545 - protein, 15 aa, Artificial Sequence
  source: /note="Description of Artificial Sequence: Synthetic peptide"
ATYKRELRYYYGMDV

SEQ ID NO: 1546 - protein, 8 aa, Artificial Sequence
  source: /note="Description of Artificial Sequence: Synthetic peptide"
VGKAVPDV

SEQ ID NO: 1547 - protein, 13 aa, Artificial Sequence
  source: /note="Description of Artificial Sequence: Synthetic peptide"
HQGVAYYNYAMDV

SEQ ID NO: 1548 - protein, 8 aa, Artificial Sequence
  source: /note="Description of Artificial Sequence: Synthetic peptide"
VVRDGMDV

SEQ ID NO: 1549 - protein, 9 aa, Artificial Sequence
  source: /note="Description of Artificial Sequence: Synthetic peptide"
IPQTGTFDY

SEQ ID NO: 1550 - protein, 15 aa, Artificial Sequence
  source: /note="Description of Artificial Sequence: Synthetic peptide"
ANYKRELRYYYGMDV

SEQ ID NO: 1551 - protein, 11 aa, Artificial Sequence
  source: /note="Description of Artificial Sequence: Synthetic peptide"
ALVGATGAFDI

SEQ ID NO: 1552 - protein, 8 aa, Artificial Sequence
  source: /note="Description of Artificial Sequence: Synthetic peptide"
WFGEGFDP

SEQ ID NO: 1553 - protein, 17 aa, Artificial Sequence
  source: /note="Description of Artificial Sequence: Synthetic peptide"
VGYDSSGYYRDYYGMDV

SEQ ID NO: 1554 - protein, 13 aa, Artificial Sequence
  source: /note="Description of Artificial Sequence: Synthetic peptide"
MGWSSGYLGAFDI

SEQ ID NO: 1555 - protein, 13 aa, Artificial Sequence
  source: /note="Description of Artificial Sequence: Synthetic peptide"
GEIYYGYDGGFAY

SEQ ID NO: 1556 - protein, 8 aa, Artificial Sequence
  source: /note="Description of Artificial Sequence: Synthetic peptide"
DYSYAMDY

SEQ ID NO: 1557 - protein, 8 aa, Artificial Sequence
  source: /note="Description of Artificial Sequence: Synthetic peptide"
DYLYSLDF

SEQ ID NO: 1558 - protein, 8 aa, Artificial Sequence
  source: /note="Description of Artificial Sequence: Synthetic peptide"
DYLYSCDY

SEQ ID NO: 1559 - protein, 7 aa, Artificial Sequence
  source: /note="Description of Artificial Sequence: Synthetic peptide"
SQSISSY

SEQ ID NO: 1560 - protein, 8 aa, Artificial Sequence
  source: /note="Description of Artificial Sequence: Synthetic peptide"
SQSISSSF

SEQ ID NO: 1561 - protein, 12 aa, Artificial Sequence
  source: /note="Description of Artificial Sequence: Synthetic peptide"
SQSLLHSNGYNY

SEQ ID NO: 1562 - protein, 12 aa, Artificial Sequence
  source: /note="Description of Artificial Sequence: Synthetic peptide"
SQSLLRNDGKTP

SEQ ID NO: 1563 - protein, 12 aa, Artificial Sequence
  source: /note="Description of Artificial Sequence: Synthetic peptide"
SQSLLHSNGYNY

SEQ ID NO: 1564 - protein, 7 aa, Artificial Sequence
  source: /note="Description of Artificial Sequence: Synthetic peptide"
SQSISSY

SEQ ID NO: 1565 - protein, 12 aa, Artificial Sequence
  source: /note="Description of Artificial Sequence: Synthetic peptide"
SQSLLYSNGYNY

SEQ ID NO: 1566 - protein, 7 aa, Artificial Sequence
  source: /note="Description of Artificial Sequence: Synthetic peptide"
SQSVSSN

SEQ ID NO: 1567 - protein, 7 aa, Artificial Sequence
  source: /note="Description of Artificial Sequence: Synthetic peptide"
SQSVSSK

SEQ ID NO: 1568 - protein, 8 aa, Artificial Sequence
  source: /note="Description of Artificial Sequence: Synthetic peptide"
SQSVGSTN

SEQ ID NO: 1569 - protein, 7 aa, Artificial Sequence
  source: /note="Description of Artificial Sequence: Synthetic peptide"
SQSISSY

SEQ ID NO: 1570 - protein, 12 aa, Artificial Sequence
  source: /note="Description of Artificial Sequence: Synthetic peptide"
SESLVHNSGKTY

SEQ ID NO: 1571 - protein, 7 aa, Artificial Sequence
  source: /note="Description of Artificial Sequence: Synthetic peptide"
SEDINKF

SEQ ID NO: 1572 - protein, 7 aa, Artificial Sequence
  source: /note="Description of Artificial Sequence: Synthetic peptide"
SQSVGSN

SEQ ID NO: 1573 - protein, 8 aa, Artificial Sequence
  source: /note="Description of Artificial Sequence: Synthetic peptide"
SQSIGSSS

SEQ ID NO: 1574 - protein, 7 aa, Artificial Sequence
  source: /note="Description of Artificial Sequence: Synthetic peptide"
SQDIDDA

SEQ ID NO: 1575 - protein, 7 aa, Artificial Sequence
  source: /note="Description of Artificial Sequence: Synthetic peptide"
SQDIYNN

SEQ ID NO: 1576 - protein, 12 aa, Artificial Sequence
  source: /note="Description of Artificial Sequence: Synthetic peptide"
SQSLLHSNGYNY

SEQ ID NO: 1577 - protein, 7 aa, Artificial Sequence
  source: /note="Description of Artificial Sequence: Synthetic peptide"
NNIGTKS

SEQ ID NO: 1578 - protein, 7 aa, Artificial Sequence
  source: /note="Description of Artificial Sequence: Synthetic peptide"
DGLSKKY

SEQ ID NO: 1579 - protein, 7 aa, Artificial Sequence
  source: /note="Description of Artificial Sequence: Synthetic peptide"
SQGIRNW

SEQ ID NO: 1580 - protein, 7 aa, Artificial Sequence
  source: /note="Description of Artificial Sequence: Synthetic peptide"
NNIGSKS

SEQ ID NO: 1581 - protein, 7 aa, Artificial Sequence
  source: /note="Description of Artificial Sequence: Synthetic peptide"
DSLGNYY

SEQ ID NO: 1582 - protein, 8 aa, Artificial Sequence
  source: /note="Description of Artificial Sequence: Synthetic peptide"
SQSVSSAY

SEQ ID NO: 1583 - protein, 7 aa, Artificial Sequence
  source: /note="Description of Artificial Sequence: Synthetic peptide"
SQSVSNS

SEQ ID NO: 1584 - protein, 8 aa, Artificial Sequence
  source: /note="Description of Artificial Sequence: Synthetic peptide"
SQSVSSSF

SEQ ID NO: 1585 - protein, 8 aa, Artificial Sequence
  source: /note="Description of Artificial Sequence: Synthetic peptide"
SQSVSTTF

SEQ ID NO: 1586 - protein, 7 aa, Artificial Sequence
  source: /note="Description of Artificial Sequence: Synthetic peptide"
SQSISSY

SEQ ID NO: 1587 - protein, 8 aa, Artificial Sequence
  source: /note="Description of Artificial Sequence: Synthetic peptide"
TQSIGSSF

SEQ ID NO: 1588 - protein, 8 aa, Artificial Sequence
  source: /note="Description of Artificial Sequence: Synthetic peptide"
SQSVSSSY

SEQ ID NO: 1589 - protein, 8 aa, Artificial Sequence
  source: /note="Description of Artificial Sequence: Synthetic peptide"
SQSVSSSY

SEQ ID NO: 1590 - protein, 8 aa, Artificial Sequence
  source: /note="Description of Artificial Sequence: Synthetic peptide"
SQRVASNY

SEQ ID NO: 1591 - protein, 8 aa, Artificial Sequence
  source: /note="Description of Artificial Sequence: Synthetic peptide"
SQSLSSNF

SEQ ID NO: 1592 - protein, 12 aa, Artificial Sequence
  source: /note="Description of Artificial Sequence: Synthetic peptide"
SQSLLHSNGYNY

SEQ ID NO: 1593 - protein, 8 aa, Artificial Sequence
  source: /note="Description of Artificial Sequence: Synthetic peptide"
SQSVSSSY

SEQ ID NO: 1594 - protein, 8 aa, Artificial Sequence
  source: /note="Description of Artificial Sequence: Synthetic peptide"
SQSVASSF

SEQ ID NO: 1595 - protein, 7 aa, Artificial Sequence
  source: /note="Description of Artificial Sequence: Synthetic peptide"
SQDVNTA

SEQ ID NO: 1596 - protein, 11 aa, Artificial Sequence
  source: /note="Description of Artificial Sequence: Synthetic peptide"
SESVSVIGAHL

SEQ ID NO: 1597 - protein, 11 aa, Artificial Sequence
  source: /note="Description of Artificial Sequence: Synthetic peptide"
SESVTILGSHL

SEQ ID NO: 1598 - protein, 11 aa, Artificial Sequence
  source: /note="Description of Artificial Sequence: Synthetic peptide"
SESVTILGSHL

SEQ ID NO: 1599 - protein, 3 aa, Artificial Sequence
  source: /note="Description of Artificial Sequence: Synthetic peptide"
AAS

SEQ ID NO: 1600 - protein, 3 aa, Artificial Sequence
  source: /note="Description of Artificial Sequence: Synthetic peptide"
GAS

SEQ ID NO: 1601 - protein, 3 aa, Artificial Sequence
  source: /note="Description of Artificial Sequence: Synthetic peptide"
LGS

SEQ ID NO: 1602 - protein, 3 aa, Artificial Sequence
  source: /note="Description of Artificial Sequence: Synthetic peptide"
EVS

SEQ ID NO: 1603 - protein, 3 aa, Artificial Sequence
  source: /note="Description of Artificial Sequence: Synthetic peptide"
LGS

SEQ ID NO: 1604 - protein, 3 aa, Artificial Sequence
  source: /note="Description of Artificial Sequence: Synthetic peptide"
GAS

SEQ ID NO: 1605 - protein, 3 aa, Artificial Sequence
  source: /note="Description of Artificial Sequence: Synthetic peptide"
LGS

SEQ ID NO: 1606 - protein, 3 aa, Artificial Sequence
  source: /note="Description of Artificial Sequence: Synthetic peptide"
GAS

SEQ ID NO: 1607 - protein, 3 aa, Artificial Sequence
  source: /note="Description of Artificial Sequence: Synthetic peptide"
GAS

SEQ ID NO: 1608 - protein, 3 aa, Artificial Sequence
  source: /note="Description of Artificial Sequence: Synthetic peptide"
DAS

SEQ ID NO: 1609 - protein, 3 aa, Artificial Sequence
  source: /note="Description of Artificial Sequence: Synthetic peptide"
AAS

SEQ ID NO: 1610 - protein, 3 aa, Artificial Sequence
  source: /note="Description of Artificial Sequence: Synthetic peptide"
EVS

SEQ ID NO: 1611 - protein, 3 aa, Artificial Sequence
  source: /note="Description of Artificial Sequence: Synthetic peptide"
DAS

SEQ ID NO: 1612 - protein, 3 aa, Artificial Sequence
  source: /note="Description of Artificial Sequence: Synthetic peptide"
GAS

SEQ ID NO: 1613 - protein, 3 aa, Artificial Sequence
  source: /note="Description of Artificial Sequence: Synthetic peptide"
GAS

SEQ ID NO: 1614 - protein, 3 aa, Artificial Sequence
  source: /note="Description of Artificial Sequence: Synthetic peptide"
SAT

SEQ ID NO: 1615 - protein, 3 aa, Artificial Sequence
  source: /note="Description of Artificial Sequence: Synthetic peptide"
AAN

SEQ ID NO: 1616 - protein, 3 aa, Artificial Sequence
  source: /note="Description of Artificial Sequence: Synthetic peptide"
LGS

SEQ ID NO: 1617 - protein, 3 aa, Artificial Sequence
  source: /note="Description of Artificial Sequence: Synthetic peptide"
DDS

SEQ ID NO: 1618 - protein, 3 aa, Artificial Sequence
  source: /note="Description of Artificial Sequence: Synthetic peptide"
RDK

SEQ ID NO: 1619 - protein, 3 aa, Artificial Sequence
  source: /note="Description of Artificial Sequence: Synthetic peptide"
AAS

SEQ ID NO: 1620 - protein, 3 aa, Artificial Sequence
  source: /note="Description of Artificial Sequence: Synthetic peptide"
GKN

SEQ ID NO: 1621 - protein, 3 aa, Artificial Sequence
  source: /note="Description of Artificial Sequence: Synthetic peptide"
GTN

SEQ ID NO: 1622 - protein, 3 aa, Artificial Sequence
  source: /note="Description of Artificial Sequence: Synthetic peptide"
GAS

SEQ ID NO: 1623 - protein, 3 aa, Artificial Sequence
  source: /note="Description of Artificial Sequence: Synthetic peptide"
DAS

SEQ ID NO: 1624 - protein, 3 aa, Artificial Sequence
  source: /note="Description of Artificial Sequence: Synthetic peptide"
GAS

SEQ ID NO: 1625 - protein, 3 aa, Artificial Sequence
  source: /note="Description of Artificial Sequence: Synthetic peptide"
GSS

SEQ ID NO: 1626 - protein, 3 aa, Artificial Sequence
  source: /note="Description of Artificial Sequence: Synthetic peptide"
AAS

SEQ ID NO: 1627 - protein, 3 aa, Artificial Sequence
  source: /note="Description of Artificial Sequence: Synthetic peptide"
GAS

SEQ ID NO: 1628 - protein, 3 aa, Artificial Sequence
  source: /note="Description of Artificial Sequence: Synthetic peptide"
GAS

SEQ ID NO: 1629 - protein, 3 aa, Artificial Sequence
  source: /note="Description of Artificial Sequence: Synthetic peptide"
GAS

SEQ ID NO: 1630 - protein, 3 aa, Artificial Sequence
  source: /note="Description of Artificial Sequence: Synthetic peptide"
GAS

SEQ ID NO: 1631 - protein, 3 aa, Artificial Sequence
  source: /note="Description of Artificial Sequence: Synthetic peptide"
GAS

SEQ ID NO: 1632 - protein, 3 aa, Artificial Sequence
  source: /note="Description of Artificial Sequence: Synthetic peptide"
LGS

SEQ ID NO: 1633 - protein, 3 aa, Artificial Sequence
  source: /note="Description of Artificial Sequence: Synthetic peptide"
GTS

SEQ ID NO: 1634 - protein, 3 aa, Artificial Sequence
  source: /note="Description of Artificial Sequence: Synthetic peptide"
GAS

SEQ ID NO: 1635 - protein, 3 aa, Artificial Sequence
  source: /note="Description of Artificial Sequence: Synthetic peptide"
SAS

SEQ ID NO: 1636 - protein, 3 aa, Artificial Sequence
  source: /note="Description of Artificial Sequence: Synthetic peptide"
LAS

SEQ ID NO: 1637 - protein, 3 aa, Artificial Sequence
  source: /note="Description of Artificial Sequence: Synthetic peptide"
LAS

SEQ ID NO: 1638 - protein, 3 aa, Artificial Sequence
  source: /note="Description of Artificial Sequence: Synthetic peptide"
LAS

SEQ ID NO: 1639 - protein, 6 aa, Artificial Sequence
  source: /note="Description of Artificial Sequence: Synthetic peptide"
SYSTPY

SEQ ID NO: 1640 - protein, 7 aa, Artificial Sequence
  source: /note="Description of Artificial Sequence: Synthetic peptide"
YHSSPSW

SEQ ID NO: 1641 - protein, 6 aa, Artificial Sequence
  source: /note="Description of Artificial Sequence: Synthetic peptide"
ALQTPY

SEQ ID NO: 1642 - protein, 5 aa, Artificial Sequence
  source: /note="Description of Artificial Sequence: Synthetic peptide"
NIQFP

SEQ ID NO: 1643 - protein, 6 aa, Artificial Sequence
  source: /note="Description of Artificial Sequence: Synthetic peptide"
ALQTPY

SEQ ID NO: 1644 - protein, 5 aa, Artificial Sequence
  source: /note="Description of Artificial Sequence: Synthetic peptide"
SYKRA

SEQ ID NO: 1645 - protein, 6 aa, Artificial Sequence
  source: /note="Description of Artificial Sequence: Synthetic peptide"
GRQFPY

SEQ ID NO: 1646 - protein, 5 aa, Artificial Sequence
  source: /note="Description of Artificial Sequence: Synthetic peptide"
YGSSL

SEQ ID NO: 1647 - protein, 6 aa, Artificial Sequence
  source: /note="Description of Artificial Sequence: Synthetic peptide"
YGSSSW

SEQ ID NO: 1648 - protein, 7 aa, Artificial Sequence
  source: /note="Description of Artificial Sequence: Synthetic peptide"
YGSSPPW

SEQ ID NO: 1649 - protein, 4 aa, Artificial Sequence
  source: /note="Description of Artificial Sequence: Synthetic peptide"
SYTL

SEQ ID NO: 1650 - protein, 6 aa, Artificial Sequence
  source: /note="Description of Artificial Sequence: Synthetic peptide"
GTHWPG

SEQ ID NO: 1651 - protein, 6 aa, Artificial Sequence
  source: /note="Description of Artificial Sequence: Synthetic peptide"
YESLPL

SEQ ID NO: 1652 - protein, 7 aa, Artificial Sequence
  source: /note="Description of Artificial Sequence: Synthetic peptide"
YNDWLPV

SEQ ID NO: 1653 - protein, 7 aa, Artificial Sequence
  source: /note="Description of Artificial Sequence: Synthetic peptide"
YAGSPPF

SEQ ID NO: 1654 - protein, 6 aa, Artificial Sequence
  source: /note="Description of Artificial Sequence: Synthetic peptide"
HDNFPL

SEQ ID NO: 1655 - protein, 6 aa, Artificial Sequence
  source: /note="Description of Artificial Sequence: Synthetic peptide"
YYRFPY

SEQ ID NO: 1656 - protein, 6 aa, Artificial Sequence
  source: /note="Description of Artificial Sequence: Synthetic peptide"
ALQTPY

SEQ ID NO: 1657 - protein, 8 aa, Artificial Sequence
  source: /note="Description of Artificial Sequence: Synthetic peptide"
WDSDSEHV

SEQ ID NO: 1658 - protein, 6 aa, Artificial Sequence
  source: /note="Description of Artificial Sequence: Synthetic peptide"
WDDTTV

SEQ ID NO: 1659 - protein, 6 aa, Artificial Sequence
  source: /note="Description of Artificial Sequence: Synthetic peptide"
YNSAPF

SEQ ID NO: 1660 - protein, 9 aa, Artificial Sequence
  source: /note="Description of Artificial Sequence: Synthetic peptide"
RDSSGDHLR

SEQ ID NO: 1661 - protein, 8 aa, Artificial Sequence
  source: /note="Description of Artificial Sequence: Synthetic peptide"
RDSSGHHL

SEQ ID NO: 1662 - protein, 11 aa, Artificial Sequence
  source: /note="Description of Artificial Sequence: Synthetic peptide"
YGSSFNGSSLF

SEQ ID NO: 1663 - protein, 7 aa, Artificial Sequence
  source: /note="Description of Artificial Sequence: Synthetic peptide"
FGTSSGL

SEQ ID NO: 1664 - protein, 7 aa, Artificial Sequence
  source: /note="Description of Artificial Sequence: Synthetic peptide"
YHSSPSW

SEQ ID NO: 1665 - protein, 7 aa, Artificial Sequence
  source: /note="Description of Artificial Sequence: Synthetic peptide"
YHSSPSW

SEQ ID NO: 1666 - protein, 6 aa, Artificial Sequence
  source: /note="Description of Artificial Sequence: Synthetic peptide"
SYSTPY

SEQ ID NO: 1667 - protein, 7 aa, Artificial Sequence
  source: /note="Description of Artificial Sequence: Synthetic peptide"
YESSPSW

SEQ ID NO: 1668 - protein, 7 aa, Artificial Sequence
  source: /note="Description of Artificial Sequence: Synthetic peptide"
YGSPPRF

SEQ ID NO: 1669 - protein, 7 aa, Artificial Sequence
  source: /note="Description of Artificial Sequence: Synthetic peptide"
YGSSPSW

SEQ ID NO: 1670 - protein, 7 aa, Artificial Sequence
  source: /note="Description of Artificial Sequence: Synthetic peptide"
YDSSPSW

SEQ ID NO: 1671 - protein, 7 aa, Artificial Sequence
  source: /note="Description of Artificial Sequence: Synthetic peptide"
YGTSPMY

SEQ ID NO: 1672 - protein, 6 aa, Artificial Sequence
  source: /note="Description of Artificial Sequence: Synthetic peptide"
ALQTPL

SEQ ID NO: 1673 - protein, 8 aa, Artificial Sequence
  source: /note="Description of Artificial Sequence: Synthetic peptide"
YGNSPPKF

SEQ ID NO: 1674 - protein, 7 aa, Artificial Sequence
  source: /note="Description of Artificial Sequence: Synthetic peptide"
YGGSPRL

SEQ ID NO: 1675 - protein, 6 aa, Artificial Sequence
  source: /note="Description of Artificial Sequence: Synthetic peptide"
HYSTPW

SEQ ID NO: 1676 - protein, 6 aa, Artificial Sequence
  source: /note="Description of Artificial Sequence: Synthetic peptide"
SRIFPR

SEQ ID NO: 1677 - protein, 6 aa, Artificial Sequence
  source: /note="Description of Artificial Sequence: Synthetic peptide"
SRTIPR

SEQ ID NO: 1678 - protein, 6 aa, Artificial Sequence
  source: /note="Description of Artificial Sequence: Synthetic peptide"
SRTIPR

SEQ ID NO: 1679 - protein, 10 aa, Artificial Sequence
  source: /note="Description of Artificial Sequence: Synthetic peptide"
GFALSNHGMS

SEQ ID NO: 1680 - protein, 10 aa, Artificial Sequence
  source: /note="Description of Artificial Sequence: Synthetic peptide"
GFTFSNYAMS

SEQ ID NO: 1681 - protein, 10 aa, Artificial Sequence
  source: /note="Description of Artificial Sequence: Synthetic peptide"
GFTFDDYAMH

SEQ ID NO: 1682 - protein, 10 aa, Artificial Sequence
  source: /note="Description of Artificial Sequence: Synthetic peptide"
GFALSNHGMS

SEQ ID NO: 1683 - protein, 10 aa, Artificial Sequence
  source: /note="Description of Artificial Sequence: Synthetic peptide"
GYIFDNFGIN

SEQ ID NO: 1684 - protein, 10 aa, Artificial Sequence
  source: /note="Description of Artificial Sequence: Synthetic peptide"
GFTFSSDAMT

SEQ ID NO: 1685 - protein, 10 aa, Artificial Sequence
  source: /note="Description of Artificial Sequence: Synthetic peptide"
GYTFSNYGIT

SEQ ID NO: 1686 - protein, 10 aa, Artificial Sequence
  source: /note="Description of Artificial Sequence: Synthetic peptide"
GFALSNHGMS

SEQ ID NO: 1687 - protein, 10 aa, Artificial Sequence
  source: /note="Description of Artificial Sequence: Synthetic peptide"
GFALSNHGMS

SEQ ID NO: 1688 - protein, 10 aa, Artificial Sequence
  source: /note="Description of Artificial Sequence: Synthetic peptide"
GFALSNHGMS

SEQ ID NO: 1689 - protein, 10 aa, Artificial Sequence
  source: /note="Description of Artificial Sequence: Synthetic peptide"
GFTFSDYYMS

SEQ ID NO: 1690 - protein, 10 aa, Artificial Sequence
  source: /note="Description of Artificial Sequence: Synthetic peptide"
GFTFSDYYMS

SEQ ID NO: 1691 - protein, 10 aa, Artificial Sequence
  source: /note="Description of Artificial Sequence: Synthetic peptide"
GFALSNHGMS

SEQ ID NO: 1692 - protein, 10 aa, Artificial Sequence
  source: /note="Description of Artificial Sequence: Synthetic peptide"
GFALSNHGMS

SEQ ID NO: 1693 - protein, 10 aa, Artificial Sequence
  source: /note="Description of Artificial Sequence: Synthetic peptide"
GFALSNHGMS

SEQ ID NO: 1694 - protein, 12 aa, Artificial Sequence
  source: /note="Description of Artificial Sequence: Synthetic peptide"
GGSISSSYYYWG

SEQ ID NO: 1695 - protein, 12 aa, Artificial Sequence
  source: /note="Description of Artificial Sequence: Synthetic peptide"
GFSLRTSGMCVS

SEQ ID NO: 1696 - protein, 10 aa, Artificial Sequence
  source: /note="Description of Artificial Sequence: Synthetic peptide"
GFTFSSYSMN

SEQ ID NO: 1697 - protein, 10 aa, Artificial Sequence
  source: /note="Description of Artificial Sequence: Synthetic peptide"
GFTFSDYYMS

SEQ ID NO: 1698 - protein, 10 aa, Artificial Sequence
  source: /note="Description of Artificial Sequence: Synthetic peptide"
GYTVTSHYIH

SEQ ID NO: 1699 - protein, 12 aa, Artificial Sequence
  source: /note="Description of Artificial Sequence: Synthetic peptide"
GGSISSGGYYWS

SEQ ID NO: 1700 - protein, 10 aa, Artificial Sequence
  source: /note="Description of Artificial Sequence: Synthetic peptide"
GGTFSSYAIS

SEQ ID NO: 1701 - protein, 12 aa, Artificial Sequence
  source: /note="Description of Artificial Sequence: Synthetic peptide"
GDSVSSNSAAWN

SEQ ID NO: 1702 - protein, 10 aa, Artificial Sequence
  source: /note="Description of Artificial Sequence: Synthetic peptide"
GFTFSSYAMS

SEQ ID NO: 1703 - protein, 10 aa, Artificial Sequence
  source: /note="Description of Artificial Sequence: Synthetic peptide"
GITFSRYPMS

SEQ ID NO: 1704 - protein, 10 aa, Artificial Sequence
  source: /note="Description of Artificial Sequence: Synthetic peptide"
GFTFSSYAMS

SEQ ID NO: 1705 - protein, 10 aa, Artificial Sequence
  source: /note="Description of Artificial Sequence: Synthetic peptide"
GFTFSSYAMS

SEQ ID NO: 1706 - protein, 10 aa, Artificial Sequence
  source: /note="Description of Artificial Sequence: Synthetic peptide"
GFTFDDYAMH

SEQ ID NO: 1707 - protein, 10 aa, Artificial Sequence
  source: /note="Description of Artificial Sequence: Synthetic peptide"
GFTFDDYAMH

SEQ ID NO: 1708 - protein, 10 aa, Artificial Sequence
  source: /note="Description of Artificial Sequence: Synthetic peptide"
GFTFSSYAMS

SEQ ID NO: 1709 - protein, 10 aa, Artificial Sequence
  source: /note="Description of Artificial Sequence: Synthetic peptide"
GFTFSSYAMS

SEQ ID NO: 1710 - protein, 10 aa, Artificial Sequence
  source: /note="Description of Artificial Sequence: Synthetic peptide"
GFTFSSYAMS

SEQ ID NO: 1711 - protein, 10 aa, Artificial Sequence
  source: /note="Description of Artificial Sequence: Synthetic peptide"
GFSFSSYAMS

SEQ ID NO: 1712 - protein, 10 aa, Artificial Sequence
  source: /note="Description of Artificial Sequence: Synthetic peptide"
GFTFSSYAMS

SEQ ID NO: 1713 - protein, 10 aa, Artificial Sequence
  source: /note="Description of Artificial Sequence: Synthetic peptide"
GFTFSSYAMS

SEQ ID NO: 1714 - protein, 10 aa, Artificial Sequence
  source: /note="Description of Artificial Sequence: Synthetic peptide"
GFTFSSYAMS

SEQ ID NO: 1715 - protein, 10 aa, Artificial Sequence
  source: /note="Description of Artificial Sequence: Synthetic peptide"
GYTFTNFGMN

SEQ ID NO: 1716 - protein, 10 aa, Artificial Sequence
  source: /note="Description of Artificial Sequence: Synthetic peptide"
GYTFTDYSIN

SEQ ID NO: 1717 - protein, 10 aa, Artificial Sequence
  source: /note="Description of Artificial Sequence: Synthetic peptide"
GYTFRHYSMN

SEQ ID NO: 1718 - protein, 10 aa, Artificial Sequence
  source: /note="Description of Artificial Sequence: Synthetic peptide"
GYTFTHYSMN

SEQ ID NO: 1719 - protein, 16 aa, Artificial Sequence
  source: /note="Description of Artificial Sequence: Synthetic peptide"
GIVYSGSTYYAASVKG

SEQ ID NO: 1720 - protein, 17 aa, Artificial Sequence
  source: /note="Description of Artificial Sequence: Synthetic peptide"
GISRSGENTYYADSVKG

SEQ ID NO: 1721 - protein, 17 aa, Artificial Sequence
  source: /note="Description of Artificial Sequence: Synthetic peptide"
GISWNSGSIGYADSVKG

SEQ ID NO: 1722 - protein, 16 aa, Artificial Sequence
  source: /note="Description of Artificial Sequence: Synthetic peptide"
GIVYSGSTYYAASVKG

SEQ ID NO: 1723 - protein, 17 aa, Artificial Sequence
  source: /note="Description of Artificial Sequence: Synthetic peptide"
WINPKNNNTNYAQKFQG

SEQ ID NO: 1724 - protein, 17 aa, Artificial Sequence
  source: /note="Description of Artificial Sequence: Synthetic peptide"
VISGSGGTTYYADSVKG

SEQ ID NO: 1725 - protein, 17 aa, Artificial Sequence
  source: /note="Description of Artificial Sequence: Synthetic peptide"
WISAYNGNTNYAQKFQG

SEQ ID NO: 1726 - protein, 16 aa, Artificial Sequence
  source: /note="Description of Artificial Sequence: Synthetic peptide"
GIVYSGSTYYAASVKG

SEQ ID NO: 1727 - protein, 16 aa, Artificial Sequence
  source: /note="Description of Artificial Sequence: Synthetic peptide"
GIVYSGSTYYAASVKG

SEQ ID NO: 1728 - protein, 16 aa, Artificial Sequence
  source: /note="Description of Artificial Sequence: Synthetic peptide"
GIVYSGSTYYAASVKG

SEQ ID NO: 1729 - protein, 17 aa, Artificial Sequence
  source: /note="Description of Artificial Sequence: Synthetic peptide"
YISSSGSTIYYADSVKG

SEQ ID NO: 1730 - protein, 17 aa, Artificial Sequence
  source: /note="Description of Artificial Sequence: Synthetic peptide"
YISSSGNTIYYADSVKG

SEQ ID NO: 1731 - protein, 16 aa, Artificial Sequence
  source: /note="Description of Artificial Sequence: Synthetic peptide"
GIVYSGSTYYAASVKG

SEQ ID NO: 1732 - protein, 16 aa, Artificial Sequence
  source: /note="Description of Artificial Sequence: Synthetic peptide"
GIVYSGSTYYAASVKG

SEQ ID NO: 1733 - protein, 16 aa, Artificial Sequence
  source: /note="Description of Artificial Sequence: Synthetic peptide"
GIVYSGSTYYAASVKG

SEQ ID NO: 1734 - protein, 16 aa, Artificial Sequence
  source: /note="Description of Artificial Sequence: Synthetic peptide"
SIYYSGSAYYNPSLKS

SEQ ID NO: 1735 - protein, 16 aa, Artificial Sequence
  source: /note="Description of Artificial Sequence: Synthetic peptide"
RIDWDEDKFYSTSLKT

SEQ ID NO: 1736 - protein, 17 aa, Artificial Sequence
  source: /note="Description of Artificial Sequence: Synthetic peptide"
SISSSSSYIYYADSVKG

SEQ ID NO: 1737 - protein, 17 aa, Artificial Sequence
  source: /note="Description of Artificial Sequence: Synthetic peptide"
YISSSGSTIYYADSVKG

SEQ ID NO: 1738 - protein, 17 aa, Artificial Sequence
  source: /note="Description of Artificial Sequence: Synthetic peptide"
MINPSGGVTAYSQTLQG

SEQ ID NO: 1739 - protein, 16 aa, Artificial Sequence
  source: /note="Description of Artificial Sequence: Synthetic peptide"
YIYYSGSTYYNPSLKS

SEQ ID NO: 1740 - protein, 17 aa, Artificial Sequence
  source: /note="Description of Artificial Sequence: Synthetic peptide"
GIIPIFGTANYAQKFQG

SEQ ID NO: 1741 - protein, 18 aa, Artificial Sequence
  source: /note="Description of Artificial Sequence: Synthetic peptide"
RTYYRSKWYSFYAISLKS

SEQ ID NO: 1742 - protein, 17 aa, Artificial Sequence
  source: /note="Description of Artificial Sequence: Synthetic peptide"
AISGSGGSTYYADSVKG

SEQ ID NO: 1743 - protein, 17 aa, Artificial Sequence
  source: /note="Description of Artificial Sequence: Synthetic peptide"
GISDSGVSTYYADSAKG

SEQ ID NO: 1744 - protein, 17 aa, Artificial Sequence
  source: /note="Description of Artificial Sequence: Synthetic peptide"
AISGSGGSTYYADSVKG

SEQ ID NO: 1745 - protein, 17 aa, Artificial Sequence
  source: /note="Description of Artificial Sequence: Synthetic peptide"
AISGSGGSTYYADSVKG

SEQ ID NO: 1746 - protein, 17 aa, Artificial Sequence
  source: /note="Description of Artificial Sequence: Synthetic peptide"
GISWNSGSIGYADSVKG

SEQ ID NO: 1747 - protein, 17 aa, Artificial Sequence
  source: /note="Description of Artificial Sequence: Synthetic peptide"
SINWKGNSLAYGDSVKG

SEQ ID NO: 1748 - protein, 17 aa, Artificial Sequence
  source: /note="Description of Artificial Sequence: Synthetic peptide"
AISGSGGSTYYADSVKG

SEQ ID NO: 1749 - protein, 17 aa, Artificial Sequence
  source: /note="Description of Artificial Sequence: Synthetic peptide"
AISGSGGSTYYADSVKG

SEQ ID NO: 1750 - protein, 17 aa, Artificial Sequence
  source: /note="Description of Artificial Sequence: Synthetic peptide"
AISGSGGSTYYADSVKG

SEQ ID NO: 1751 - protein, 17 aa, Artificial Sequence
  source: /note="Description of Artificial Sequence: Synthetic peptide"
AISGSGGSTYYADSVKG

SEQ ID NO: 1752 - protein, 17 aa, Artificial Sequence
  source: /note="Description of Artificial Sequence: Synthetic peptide"
AISGSGGSTYYADSVKG

SEQ ID NO: 1753 - protein, 17 aa, Artificial Sequence
  source: /note="Description of Artificial Sequence: Synthetic peptide"
AISGSGGSTYYADSVKG

SEQ ID NO: 1754 - protein, 17 aa, Artificial Sequence
  source: /note="Description of Artificial Sequence: Synthetic peptide"
AISGSGGSTYYADSVKG

SEQ ID NO: 1755 - protein, 17 aa, Artificial Sequence
  source: /note="Description of Artificial Sequence: Synthetic peptide"
WINTYTGESYFADDFKG

SEQ ID NO: 1756 - protein, 17 aa, Artificial Sequence
  source: /note="Description of Artificial Sequence: Synthetic peptide"
WINTETREPAYAYDFRG

SEQ ID NO: 1757 - protein, 17 aa, Artificial Sequence
  source: /note="Description of Artificial Sequence: Synthetic peptide"
RINTESGVPIYADDFKG

SEQ ID NO: 1758 - protein, 17 aa, Artificial Sequence
  source: /note="Description of Artificial Sequence: Synthetic peptide"
RINTETGEPLYADDFKG

SEQ ID NO: 1759 - protein, 7 aa, Artificial Sequence
  source: /note="Description of Artificial Sequence: Synthetic peptide"
HGGESDV

SEQ ID NO: 1760 - protein, 11 aa, Artificial Sequence
  source: /note="Description of Artificial Sequence: Synthetic peptide"
SPAHYYGGMDV

SEQ ID NO: 1761 - protein, 6 aa, Artificial Sequence
  source: /note="Description of Artificial Sequence: Synthetic peptide"
HSFLAY

SEQ ID NO: 1762 - protein, 7 aa, Artificial Sequence
  source: /note="Description of Artificial Sequence: Synthetic peptide"
HGGESDV

SEQ ID NO: 1763 - protein, 11 aa, Artificial Sequence
  source: /note="Description of Artificial Sequence: Synthetic peptide"
GPYYYQSYMDV

SEQ ID NO: 1764 - protein, 14 aa, Artificial Sequence
  source: /note="Description of Artificial Sequence: Synthetic peptide"
LDSSGYYYARGPRY

SEQ ID NO: 1765 - protein, 9 aa, Artificial Sequence
  source: /note="Description of Artificial Sequence: Synthetic peptide"
GPYYYYMDV

SEQ ID NO: 1766 - protein, 7 aa, Artificial Sequence
  source: /note="Description of Artificial Sequence: Synthetic peptide"
HGGESDV

SEQ ID NO: 1767 - protein, 7 aa, Artificial Sequence
  source: /note="Description of Artificial Sequence: Synthetic peptide"
HGGESDV

SEQ ID NO: 1768 - protein, 7 aa, Artificial Sequence
  source: /note="Description of Artificial Sequence: Synthetic peptide"
HGGESDV

SEQ ID NO: 1769 - protein, 8 aa, Artificial Sequence
  source: /note="Description of Artificial Sequence: Synthetic peptide"
ESGDGMDV

SEQ ID NO: 1770 - protein, 8 aa, Artificial Sequence
  source: /note="Description of Artificial Sequence: Synthetic peptide"
STMVREDY

SEQ ID NO: 1771 - protein, 7 aa, Artificial Sequence
  source: /note="Description of Artificial Sequence: Synthetic peptide"
HGGESDV

SEQ ID NO: 1772 - protein, 7 aa, Artificial Sequence
  source: /note="Description of Artificial Sequence: Synthetic peptide"
HGGESDV

SEQ ID NO: 1773 - protein, 7 aa, Artificial Sequence
  source: /note="Description of Artificial Sequence: Synthetic peptide"
HGGESDV

SEQ ID NO: 1774 - protein, 11 aa, Artificial Sequence
  source: /note="Description of Artificial Sequence: Synthetic peptide"
HWQEWPDAFDI

SEQ ID NO: 1775 - protein, 13 aa, Artificial Sequence
  source: /note="Description of Artificial Sequence: Synthetic peptide"
SGAGGTSATAFDI

SEQ ID NO: 1776 - protein, 10 aa, Artificial Sequence
  source: /note="Description of Artificial Sequence: Synthetic peptide"
TIAAVYAFDI

SEQ ID NO: 1777 - protein, 8 aa, Artificial Sequence
  source: /note="Description of Artificial Sequence: Synthetic peptide"
DLRGAFDI

SEQ ID NO: 1778 - protein, 11 aa, Artificial Sequence
  source: /note="Description of Artificial Sequence: Synthetic peptide"
EGSGSGWYFDF

SEQ ID NO: 1779 - protein, 13 aa, Artificial Sequence
  source: /note="Description of Artificial Sequence: Synthetic peptide"
AGIAARLRGAFDI

SEQ ID NO: 1780 - protein, 20 aa, Artificial Sequence
  source: /note="Description of Artificial Sequence: Synthetic peptide"
RGGYQLLRWDVGLLRSAFDI

SEQ ID NO: 1781 - protein, 13 aa, Artificial Sequence
  source: /note="Description of Artificial Sequence: Synthetic peptide"
SSPEGLFLYWFDP

SEQ ID NO: 1782 - protein, 9 aa, Artificial Sequence
  source: /note="Description of Artificial Sequence: Synthetic peptide"
VEGSGSLDY

SEQ ID NO: 1783 - protein, 9 aa, Artificial Sequence
  source: /note="Description of Artificial Sequence: Synthetic peptide"
RAGSEASDI

SEQ ID NO: 1784 - protein, 15 aa, Artificial Sequence
  source: /note="Description of Artificial Sequence: Synthetic peptide"
ATYKRELRYYYGMDV

SEQ ID NO: 1785 - protein, 15 aa, Artificial Sequence
  source: /note="Description of Artificial Sequence: Synthetic peptide"
ATYKRELRYYYGMDV

SEQ ID NO: 1786 - protein, 8 aa, Artificial Sequence
  source: /note="Description of Artificial Sequence: Synthetic peptide"
VGKAVPDV

SEQ ID NO: 1787 - protein, 13 aa, Artificial Sequence
  source: /note="Description of Artificial Sequence: Synthetic peptide"
HQGVAYYNYAMDV

SEQ ID NO: 1788 - protein, 8 aa, Artificial Sequence
  source: /note="Description of Artificial Sequence: Synthetic peptide"
VVRDGMDV

SEQ ID NO: 1789 - protein, 9 aa, Artificial Sequence
  source: /note="Description of Artificial Sequence: Synthetic peptide"
IPQTGTFDY

SEQ ID NO: 1790 - protein, 15 aa, Artificial Sequence
  source: /note="Description of Artificial Sequence: Synthetic peptide"
ANYKRELRYYYGMDV

SEQ ID NO: 1791 - protein, 11 aa, Artificial Sequence
  source: /note="Description of Artificial Sequence: Synthetic peptide"
ALVGATGAFDI

SEQ ID NO: 1792 - protein, 8 aa, Artificial Sequence
  source: /note="Description of Artificial Sequence: Synthetic peptide"
WFGEGFDP

SEQ ID NO: 1793 - protein, 17 aa, Artificial Sequence
  source: /note="Description of Artificial Sequence: Synthetic peptide"
VGYDSSGYYRDYYGMDV

SEQ ID NO: 1794 - protein, 13 aa, Artificial Sequence
  source: /note="Description of Artificial Sequence: Synthetic peptide"
MGWSSGYLGAFDI

SEQ ID NO: 1795 - protein, 13 aa, Artificial Sequence
  source: /note="Description of Artificial Sequence: Synthetic peptide"
GEIYYGYDGGFAY

SEQ ID NO: 1796 - protein, 8 aa, Artificial Sequence
  source: /note="Description of Artificial Sequence: Synthetic peptide"
DYSYAMDY

SEQ ID NO: 1797 - protein, 8 aa, Artificial Sequence
  source: /note="Description of Artificial Sequence: Synthetic peptide"
DYLYSLDF

SEQ ID NO: 1798 - protein, 8 aa, Artificial Sequence
  source: /note="Description of Artificial Sequence: Synthetic peptide"
DYLYSCDY

SEQ ID NO: 1799 - protein, 11 aa, Artificial Sequence
  source: /note="Description of Artificial Sequence: Synthetic peptide"
RASQSISSYLN

SEQ ID NO: 1800 - protein, 12 aa, Artificial Sequence
  source: /note="Description of Artificial Sequence: Synthetic peptide"
RASQSISSSFLA

SEQ ID NO: 1801 - protein, 16 aa, Artificial Sequence
  source: /note="Description of Artificial Sequence: Synthetic peptide"
RSSQSLLHSNGYNYLD

SEQ ID NO: 1802 - protein, 16 aa, Artificial Sequence
  source: /note="Description of Artificial Sequence: Synthetic peptide"
KSSQSLLRNDGKTPLY

SEQ ID NO: 1803 - protein, 16 aa, Artificial Sequence
  source: /note="Description of Artificial Sequence: Synthetic peptide"
RSSQSLLHSNGYNYLN

SEQ ID NO: 1804 - protein, 11 aa, Artificial Sequence
  source: /note="Description of Artificial Sequence: Synthetic peptide"
RASQSISSYLN

SEQ ID NO: 1805 - protein, 16 aa, Artificial Sequence
  source: /note="Description of Artificial Sequence: Synthetic peptide"
RSSQSLLYSNGYNYVD

SEQ ID NO: 1806 - protein, 11 aa, Artificial Sequence
  source: /note="Description of Artificial Sequence: Synthetic peptide"
RASQSVSSNLA

SEQ ID NO: 1807 - protein, 11 aa, Artificial Sequence
  source: /note="Description of Artificial Sequence: Synthetic peptide"
RASQSVSSKLA

SEQ ID NO: 1808 - protein, 12 aa, Artificial Sequence
  source: /note="Description of Artificial Sequence: Synthetic peptide"
RASQSVGSTNLA

SEQ ID NO: 1809 - protein, 11 aa, Artificial Sequence
  source: /note="Description of Artificial Sequence: Synthetic peptide"
RASQSISSYLN

SEQ ID NO: 1810 - protein, 16 aa, Artificial Sequence
  source: /note="Description of Artificial Sequence: Synthetic peptide"
KSSESLVHNSGKTYLN

SEQ ID NO: 1811 - protein, 11 aa, Artificial Sequence
  source: /note="Description of Artificial Sequence: Synthetic peptide"
QASEDINKFLN

SEQ ID NO: 1812 - protein, 11 aa, Artificial Sequence
  source: /note="Description of Artificial Sequence: Synthetic peptide"
RASQSVGSNLA

SEQ ID NO: 1813 - protein, 12 aa, Artificial Sequence
  source: /note="Description of Artificial Sequence: Synthetic peptide"
RASQSIGSSSLA

SEQ ID NO: 1814 - protein, 11 aa, Artificial Sequence
  source: /note="Description of Artificial Sequence: Synthetic peptide"
KASQDIDDAMN

SEQ ID NO: 1815 - protein, 11 aa, Artificial Sequence
  source: /note="Description of Artificial Sequence: Synthetic peptide"
RASQDIYNNLA

SEQ ID NO: 1816 - protein, 16 aa, Artificial Sequence
  source: /note="Description of Artificial Sequence: Synthetic peptide"
RSSQSLLHSNGYNYLD

SEQ ID NO: 1817 - protein, 11 aa, Artificial Sequence
  source: /note="Description of Artificial Sequence: Synthetic peptide"
GGNNIGTKSVH

SEQ ID NO: 1818 - protein, 11 aa, Artificial Sequence
  source: /note="Description of Artificial Sequence: Synthetic peptide"
SGDGLSKKYVS

SEQ ID NO: 1819 - protein, 11 aa, Artificial Sequence
  source: /note="Description of Artificial Sequence: Synthetic peptide"
RASQGIRNWLA

SEQ ID NO: 1820 - protein, 11 aa, Artificial Sequence
  source: /note="Description of Artificial Sequence: Synthetic peptide"
GGNNIGSKSVH

SEQ ID NO: 1821 - protein, 11 aa, Artificial Sequence
  source: /note="Description of Artificial Sequence: Synthetic peptide"
QGDSLGNYYAT

SEQ ID NO: 1822 - protein, 12 aa, Artificial Sequence
  source: /note="Description of Artificial Sequence: Synthetic peptide"
RASQSVSSAYLA

SEQ ID NO: 1823 - protein, 11 aa, Artificial Sequence
  source: /note="Description of Artificial Sequence: Synthetic peptide"
RASQSVSNSLA

SEQ ID NO: 1824 - protein, 12 aa, Artificial Sequence
  source: /note="Description of Artificial Sequence: Synthetic peptide"
RASQSVSSSFLA

SEQ ID NO: 1825 - protein, 12 aa, Artificial Sequence
  source: /note="Description of Artificial Sequence: Synthetic peptide"
RASQSVSTTFLA

SEQ ID NO: 1826 - protein, 11 aa, Artificial Sequence
  source: /note="Description of Artificial Sequence: Synthetic peptide"
RASQSISSYLN

SEQ ID NO: 1827 - protein, 12 aa, Artificial Sequence
  source: /note="Description of Artificial Sequence: Synthetic peptide"
RATQSIGSSFLA

SEQ ID NO: 1828 - protein, 12 aa, Artificial Sequence
  source: /note="Description of Artificial Sequence: Synthetic peptide"
RASQSVSSSYLA

SEQ ID NO: 1829 - protein, 12 aa, Artificial Sequence
  source: /note="Description of Artificial Sequence: Synthetic peptide"
RASQSVSSSYLA

SEQ ID NO: 1830 - protein, 12 aa, Artificial Sequence
  source: /note="Description of Artificial Sequence: Synthetic peptide"
RASQRVASNYLA

SEQ ID NO: 1831 - protein, 12 aa, Artificial Sequence
  source: /note="Description of Artificial Sequence: Synthetic peptide"
RASQSLSSNFLA

SEQ ID NO: 1832 - protein, 16 aa, Artificial Sequence
  source: /note="Description of Artificial Sequence: Synthetic peptide"
RSSQSLLHSNGYNYLD

SEQ ID NO: 1833 - protein, 12 aa, Artificial Sequence
  source: /note="Description of Artificial Sequence: Synthetic peptide"
RASQSVSSSYLA

SEQ ID NO: 1834 - protein, 12 aa, Artificial Sequence
  source: /note="Description of Artificial Sequence: Synthetic peptide"
RASQSVASSFLA

SEQ ID NO: 1835 - protein, 11 aa, Artificial Sequence
  source: /note="Description of Artificial Sequence: Synthetic peptide"
RASQDVNTAVS

SEQ ID NO: 1836 - protein, 15 aa, Artificial Sequence
  source: /note="Description of Artificial Sequence: Synthetic peptide"
RASESVSVIGAHLIH

SEQ ID NO: 1837 - protein, 15 aa, Artificial Sequence
  source: /note="Description of Artificial Sequence: Synthetic peptide"
RASESVTILGSHLIY

SEQ ID NO: 1838 - protein, 15 aa, Artificial Sequence
  source: /note="Description of Artificial Sequence: Synthetic peptide"
RASESVTILGSHLIY

SEQ ID NO: 1839 - protein, 7 aa, Artificial Sequence
  source: /note="Description of Artificial Sequence: Synthetic peptide"
AASSLQS

SEQ ID NO: 1840 - protein, 7 aa, Artificial Sequence
  source: /note="Description of Artificial Sequence: Synthetic peptide"
GASRRAT

SEQ ID NO: 1841 - protein, 7 aa, Artificial Sequence
  source: /note="Description of Artificial Sequence: Synthetic peptide"
LGSNRAS

SEQ ID NO: 1842 - protein, 7 aa, Artificial Sequence
  source: /note="Description of Artificial Sequence: Synthetic peptide"
EVSNRFS

SEQ ID NO: 1843 - protein, 7 aa, Artificial Sequence
  source: /note="Description of Artificial Sequence: Synthetic peptide"
LGSKRAS

SEQ ID NO: 1844 - protein, 7 aa, Artificial Sequence
  source: /note="Description of Artificial Sequence: Synthetic peptide"
GASTLAS

SEQ ID NO: 1845 - protein, 7 aa, Artificial Sequence
  source: /note="Description of Artificial Sequence: Synthetic peptide"
LGSNRAS

SEQ ID NO: 1846 - protein, 7 aa, Artificial Sequence
  source: /note="Description of Artificial Sequence: Synthetic peptide"
GASTRAS

SEQ ID NO: 1847 - protein, 7 aa, Artificial Sequence
  source: /note="Description of Artificial Sequence: Synthetic peptide"
GASIRAT

SEQ ID NO: 1848 - protein, 7 aa, Artificial Sequence
  source: /note="Description of Artificial Sequence: Synthetic peptide"
DASNRAT

SEQ ID NO: 1849 - protein, 7 aa, Artificial Sequence
  source: /note="Description of Artificial Sequence: Synthetic peptide"
AASSLQS

SEQ ID NO: 1850 - protein, 7 aa, Artificial Sequence
  source: /note="Description of Artificial Sequence: Synthetic peptide"
EVSNRDS

SEQ ID NO: 1851 - protein, 7 aa, Artificial Sequence
  source: /note="Description of Artificial Sequence: Synthetic peptide"
DASTLQT

SEQ ID NO: 1852 - protein, 7 aa, Artificial Sequence
  source: /note="Description of Artificial Sequence: Synthetic peptide"
GASTRAT

SEQ ID NO: 1853 - protein, 7 aa, Artificial Sequence
  source: /note="Description of Artificial Sequence: Synthetic peptide"
GASSRAS

SEQ ID NO: 1854 - protein, 7 aa, Artificial Sequence
  source: /note="Description of Artificial Sequence: Synthetic peptide"
SATSPVP

SEQ ID NO: 1855 - protein, 7 aa, Artificial Sequence
  source: /note="Description of Artificial Sequence: Synthetic peptide"
AANKSQS

SEQ ID NO: 1856 - protein, 7 aa, Artificial Sequence
  source: /note="Description of Artificial Sequence: Synthetic peptide"
LGSNRAS

SEQ ID NO: 1857 - protein, 7 aa, Artificial Sequence
  source: /note="Description of Artificial Sequence: Synthetic peptide"
DDSVRPS

SEQ ID NO: 1858 - protein, 7 aa, Artificial Sequence
  source: /note="Description of Artificial Sequence: Synthetic peptide"
RDKERPS

SEQ ID NO: 1859 - protein, 7 aa, Artificial Sequence
  source: /note="Description of Artificial Sequence: Synthetic peptide"
AASNLQS

SEQ ID NO: 1860 - protein, 7 aa, Artificial Sequence
  source: /note="Description of Artificial Sequence: Synthetic peptide"
GKNNRPS

SEQ ID NO: 1861 - protein, 7 aa, Artificial Sequence
  source: /note="Description of Artificial Sequence: Synthetic peptide"
GTNNRPS

SEQ ID NO: 1862 - protein, 7 aa, Artificial Sequence
  source: /note="Description of Artificial Sequence: Synthetic peptide"
GASTRAT

SEQ ID NO: 1863 - protein, 7 aa, Artificial Sequence
  source: /note="Description of Artificial Sequence: Synthetic peptide"
DASSRAT

SEQ ID NO: 1864 - protein, 7 aa, Artificial Sequence
  source: /note="Description of Artificial Sequence: Synthetic peptide"
GASSRAT

SEQ ID NO: 1865 - protein, 7 aa, Artificial Sequence
  source: /note="Description of Artificial Sequence: Synthetic peptide"
GSSNRAT

SEQ ID NO: 1866 - protein, 7 aa, Artificial Sequence
  source: /note="Description of Artificial Sequence: Synthetic peptide"
AASSLQS

SEQ ID NO: 1867 - protein, 7 aa, Artificial Sequence
  source: /note="Description of Artificial Sequence: Synthetic peptide"
GASQRAT

SEQ ID NO: 1868 - protein, 7 aa, Artificial Sequence
  source: /note="Description of Artificial Sequence: Synthetic peptide"
GASSRAT

SEQ ID NO: 1869 - protein, 7 aa, Artificial Sequence
  source: /note="Description of Artificial Sequence: Synthetic peptide"
GASSRAT

SEQ ID NO: 1870 - protein, 7 aa, Artificial Sequence
  source: /note="Description of Artificial Sequence: Synthetic peptide"
GASSRAT

SEQ ID NO: 1871 - protein, 7 aa, Artificial Sequence
  source: /note="Description of Artificial Sequence: Synthetic peptide"
GASNWAT

SEQ ID NO: 1872 - protein, 7 aa, Artificial Sequence
  source: /note="Description of Artificial Sequence: Synthetic peptide"
LGSNRAS

SEQ ID NO: 1873 - protein, 7 aa, Artificial Sequence
  source: /note="Description of Artificial Sequence: Synthetic peptide"
GTSSRAT

SEQ ID NO: 1874 - protein, 7 aa, Artificial Sequence
  source: /note="Description of Artificial Sequence: Synthetic peptide"
GASGRAT

SEQ ID NO: 1875 - protein, 7 aa, Artificial Sequence
  source: /note="Description of Artificial Sequence: Synthetic peptide"
SASYRYT

SEQ ID NO: 1876 - protein, 7 aa, Artificial Sequence
  source: /note="Description of Artificial Sequence: Synthetic peptide"
LASNLET

SEQ ID NO: 1877 - protein, 7 aa, Artificial Sequence
  source: /note="Description of Artificial Sequence: Synthetic peptide"
LASNVQT

SEQ ID NO: 1878 - protein, 7 aa, Artificial Sequence
  source: /note="Description of Artificial Sequence: Synthetic peptide"
LASNVQT

SEQ ID NO: 1879 - protein, 9 aa, Artificial Sequence
  source: /note="Description of Artificial Sequence: Synthetic peptide"
QQSYSTPYT

SEQ ID NO: 1880 - protein, 10 aa, Artificial Sequence
  source: /note="Description of Artificial Sequence: Synthetic peptide"
QQYHSSPSWT

SEQ ID NO: 1881 - protein, 9 aa, Artificial Sequence
  source: /note="Description of Artificial Sequence: Synthetic peptide"
MQALQTPYT

SEQ ID NO: 1882 - protein, 8 aa, Artificial Sequence
  source: /note="Description of Artificial Sequence: Synthetic peptide"
MQNIQFPS

SEQ ID NO: 1883 - protein, 9 aa, Artificial Sequence
  source: /note="Description of Artificial Sequence: Synthetic peptide"
MQALQTPYT

SEQ ID NO: 1884 - protein, 8 aa, Artificial Sequence
  source: /note="Description of Artificial Sequence: Synthetic peptide"
QQSYKRAS

SEQ ID NO: 1885 - protein, 9 aa, Artificial Sequence
  source: /note="Description of Artificial Sequence: Synthetic peptide"
MQGRQFPYS

SEQ ID NO: 1886 - protein, 8 aa, Artificial Sequence
  source: /note="Description of Artificial Sequence: Synthetic peptide"
QQYGSSLT

SEQ ID NO: 1887 - protein, 9 aa, Artificial Sequence
  source: /note="Description of Artificial Sequence: Synthetic peptide"
QQYGSSSWT

SEQ ID NO: 1888 - protein, 10 aa, Artificial Sequence
  source: /note="Description of Artificial Sequence: Synthetic peptide"
QQYGSSPPWT

SEQ ID NO: 1889 - protein, 7 aa, Artificial Sequence
  source: /note="Description of Artificial Sequence: Synthetic peptide"
QQSYTLA

SEQ ID NO: 1890 - protein, 9 aa, Artificial Sequence
  source: /note="Description of Artificial Sequence: Synthetic peptide"
MQGTHWPGT

SEQ ID NO: 1891 - protein, 9 aa, Artificial Sequence
  source: /note="Description of Artificial Sequence: Synthetic peptide"
QQYESLPLT

SEQ ID NO: 1892 - protein, 10 aa, Artificial Sequence
  source: /note="Description of Artificial Sequence: Synthetic peptide"
QQYNDWLPVT

SEQ ID NO: 1893 - protein, 10 aa, Artificial Sequence
  source: /note="Description of Artificial Sequence: Synthetic peptide"
QQYAGSPPFT

SEQ ID NO: 1894 - protein, 9 aa, Artificial Sequence
  source: /note="Description of Artificial Sequence: Synthetic peptide"
LQHDNFPLT

SEQ ID NO: 1895 - protein, 9 aa, Artificial Sequence
  source: /note="Description of Artificial Sequence: Synthetic peptide"
QHYYRFPYS

SEQ ID NO: 1896 - protein, 9 aa, Artificial Sequence
  source: /note="Description of Artificial Sequence: Synthetic peptide"
MQALQTPYT

SEQ ID NO: 1897 - protein, 11 aa, Artificial Sequence
  source: /note="Description of Artificial Sequence: Synthetic peptide"
QVWDSDSEHVV

SEQ ID NO: 1898 - protein, 9 aa, Artificial Sequence
  source: /note="Description of Artificial Sequence: Synthetic peptide"
QAWDDTTVV

SEQ ID NO: 1899 - protein, 9 aa, Artificial Sequence
  source: /note="Description of Artificial Sequence: Synthetic peptide"
QKYNSAPFT

SEQ ID NO: 1900 - protein, 12 aa, Artificial Sequence
  source: /note="Description of Artificial Sequence: Synthetic peptide"
SSRDSSGDHLRV

SEQ ID NO: 1901 - protein, 11 aa, Artificial Sequence
  source: /note="Description of Artificial Sequence: Synthetic peptide"
NSRDSSGHHLL

SEQ ID NO: 1902 - protein, 14 aa, Artificial Sequence
  source: /note="Description of Artificial Sequence: Synthetic peptide"
QHYGSSFNGSSLFT

SEQ ID NO: 1903 - protein, 10 aa, Artificial Sequence
  source: /note="Description of Artificial Sequence: Synthetic peptide"
QQFGTSSGLT

SEQ ID NO: 1904 - protein, 10 aa, Artificial Sequence
  source: /note="Description of Artificial Sequence: Synthetic peptide"
QQYHSSPSWT

SEQ ID NO: 1905 - protein, 10 aa, Artificial Sequence
  source: /note="Description of Artificial Sequence: Synthetic peptide"
QQYHSSPSWT

SEQ ID NO: 1906 - protein, 9 aa, Artificial Sequence
  source: /note="Description of Artificial Sequence: Synthetic peptide"
QQSYSTPYS

SEQ ID NO: 1907 - protein, 10 aa, Artificial Sequence
  source: /note="Description of Artificial Sequence: Synthetic peptide"
QHYESSPSWT

SEQ ID NO: 1908 - protein, 10 aa, Artificial Sequence
  source: /note="Description of Artificial Sequence: Synthetic peptide"
QQYGSPPRFT

SEQ ID NO: 1909 - protein, 10 aa, Artificial Sequence
  source: /note="Description of Artificial Sequence: Synthetic peptide"
QHYGSSPSWT

SEQ ID NO: 1910 - protein, 10 aa, Artificial Sequence
  source: /note="Description of Artificial Sequence: Synthetic peptide"
QHYDSSPSWT

SEQ ID NO: 1911 - protein, 10 aa, Artificial Sequence
  source: /note="Description of Artificial Sequence: Synthetic peptide"
QYYGTSPMYT

SEQ ID NO: 1912 - protein, 9 aa, Artificial Sequence
  source: /note="Description of Artificial Sequence: Synthetic peptide"
MQALQTPLT

SEQ ID NO: 1913 - protein, 11 aa, Artificial Sequence
  source: /note="Description of Artificial Sequence: Synthetic peptide"
QHYGNSPPKFT

SEQ ID NO: 1914 - protein, 10 aa, Artificial Sequence
  source: /note="Description of Artificial Sequence: Synthetic peptide"
QHYGGSPRLT

SEQ ID NO: 1915 - protein, 9 aa, Artificial Sequence
  source: /note="Description of Artificial Sequence: Synthetic peptide"
QQHYSTPWT

SEQ ID NO: 1916 - protein, 9 aa, Artificial Sequence
  source: /note="Description of Artificial Sequence: Synthetic peptide"
LQSRIFPRT

SEQ ID NO: 1917 - protein, 9 aa, Artificial Sequence
  source: /note="Description of Artificial Sequence: Synthetic peptide"
LQSRTIPRT

SEQ ID NO: 1918 - protein, 9 aa, Artificial Sequence
  source: /note="Description of Artificial Sequence: Synthetic peptide"
LQSRTIPRT

SEQ ID NO: 1919 - protein, 21 aa, Artificial Sequence
  source: /note="Description of Artificial Sequence: Synthetic peptide"
MALPVTALLLPLALLLHAARP

SEQ ID NO: 1920 - DNA, 63 bp, Artificial Sequence; identical to SEQ ID NO: 402
  source: /note="Description of Artificial Sequence: Synthetic oligonucleotide"

SEQ ID NO: 1921 - protein, 45 aa, Artificial Sequence; identical to SEQ ID NO: 403
  source: /note="Description of Artificial Sequence: Synthetic polypeptide"

SEQ ID NO: 1922 - DNA, 135 bp, Artificial Sequence; identical to SEQ ID NO: 404
  source: /note="Description of Artificial Sequence: Synthetic polynucleotide"

SEQ ID NO: 1923 - protein, 24 aa, Artificial Sequence
  source: /note="Description of Artificial Sequence: Synthetic peptide"
IYIWAPLAGTCGVLLLSLVITLYC

SEQ ID NO: 1924 - DNA, 72 bp, Artificial Sequence; identical to SEQ ID NO: 13
  source: /note="Description of Artificial Sequence: Synthetic oligonucleotide"

SEQ ID NO: 1925 - protein, 42 aa, Artificial Sequence; identical to SEQ ID NO: 14
  source: /note="Description of Artificial Sequence: Synthetic polypeptide"

SEQ ID NO: 1926 - DNA, 126 bp, Artificial Sequence; identical to SEQ ID NO: 15
  source: /note="Description of Artificial Sequence: Synthetic polynucleotide"

SEQ ID NO: 1927 - protein, 41 aa, Artificial Sequence; identical to SEQ ID NO: 5
  source: /note="Description of Artificial Sequence: Synthetic polypeptide"

SEQ ID NO: 1928 - DNA, 123 bp, Artificial Sequence; identical to SEQ ID NO: 6
  source: /note="Description of Artificial Sequence: Synthetic polynucleotide"

SEQ ID NO: 1929 - protein, 35 aa, Artificial Sequence
  source: /note="Description of Artificial Sequence: Synthetic polypeptide"
TKKKYSSSVHDPNGEYMFMRAVNTAKKSRLTDVTL

SEQ ID NO: 1930 - DNA, 105 bp, Artificial Sequence
  source: /note="Description of Artificial Sequence: Synthetic polynucleotide"
acaaaaaagaagtattcatccagtgtgcacgaccctaacggtgaatacatgttcatgagagcagtgaacacagccaaaaaatccagactcacagatgtgacccta

SEQ ID NO: 1931 - protein, 112 aa, Artificial Sequence; identical to SEQ ID NO: 18
  source: /note="Description of Artificial Sequence: Synthetic polypeptide"

SEQ ID NO: 1932 - DNA, 336 bp, Artificial Sequence; identical to SEQ ID NO: 19
  source: /note="Description of Artificial Sequence: Synthetic polynucleotide"

SEQ ID NO: 1933 - protein, 112 aa, Artificial Sequence; identical to SEQ ID NO: 20
  source: /note="Description of Artificial Sequence: Synthetic polypeptide"

SEQ ID NO: 1934 - DNA, 336 bp, Artificial Sequence; identical to SEQ ID NO: 21
  source: /note="Description of Artificial Sequence: Synthetic polynucleotide"

SEQ ID NO: 1935 - protein, 230 aa, Artificial Sequence; identical to SEQ ID NO: 405
  source: /note="Description of Artificial Sequence: Synthetic polypeptide"

SEQ ID NO: 1936 - DNA, 690 bp, Artificial Sequence; identical to SEQ ID NO: 406
  source: /note="Description of Artificial Sequence: Synthetic polynucleotide"

SEQ ID NO: 1937 - protein, 464 aa, Artificial Sequence
  source: /note="Description of Artificial Sequence: Synthetic polypeptide"
QVQLLESGAELVRPGSSVKISCKASGYAFSSYWMNWVKQRPGQGLEWIGQIYPGDGDTNYNGKFKGQATLTADKSSSTAYMQLSGLTSEDSAVYSCARKTISSVVDFYFDYWGQGTTVTGGGSGGGSGGGSGGGSELVLTQSPKFMSTSVGDRVSVTCKASQNVGTNVAWYQQKPGQSPKPLIYSATYRNSGVPDRFTGSGSGTDFTLTITNVQSKDLADYFCQYNRYPYTSFFFTKLEIKRRSKIEVMYPPPYLDNEKSNGTIIHVKGKHLCPSPLFPGPSKPFWVLVVVGGVLACYSLLVTVAFIIFWVRSKRSRLLHSDYMNMTPRRPGPTRKHYQPYAPPRDFAAYRSRVKFSRSADAPAYQQGQNQLYNELNLGRREEYDVLDKRRGRDPEMGGKPRRKNPQEGLYNELQKDKMAEAYSEIGMKGERRRGKGHDGLYQGLSTATKDTYDALHMQALPPR

SEQ ID NO: 1938 - protein, 439 aa, Artificial Sequence
  source: /note="Description of Artificial Sequence: Synthetic polypeptide"
DIQMTQTTSSLSASLGDRVTISCRASQDISKYLNWYQQKPDGTVKLLIYHTSRLHSGVPSRFSGSGSGTDYSLTISNLEQEDIATYFCQQGNTLPYTFGGGTKLEITGSTSGSGKPGSGEGSTKGEVKLQESGPGLVAPSQSLSVTCTVSGVSLPDYGVSWIRQPPRKGLEWLGVIWGSETTYYNSALKSRLTIIKDNSKSQVFLKMNSLQTDDTAIYYCAKHYYYGGSYAMDYWGQGTSVTVSSESKYGPPCPPCPMFWVLVVVGGVLACYSLLVTVAFIIFWVKRGRKKLLYIFKQPFMRPVQTTQEEDGCSCRFEEEEGGCELRVKFSRSADAPAYQQGQNQLYNELNLGRREEYDVLDKRRGRDPEMGGKPRRKNPQEGLYNELQKDKMAEAYSEIGMKGERRRGKGHDGLYQGLSTATKDTYDALHMQALPPRL

SEQ ID NO: 1939 - protein, 819 aa, Artificial Sequence
  source: /note="Description of Artificial Sequence: Synthetic polypeptide"
DIQMTQTTSSLSASLGDRVTISCRASQDISKYLNWYQQKPDGTVKLLIYHTSRLHSGVPSRFSGSGSGTDYSLTISNLEQEDIATYFCQQGNTLPYTFGGGTKLEITGSTSGSGKPGSGEGSTKGEVKLQESGPGLVAPSQSLSVTCTVSGVSLPDYGVSWIRQPPRKGLEWLGVIWGSETTYYNSALKSRLTIIKDNSKSQVFLKMNSLQTDDTAIYYCAKHYYYGGSYAMDYWGQGTSVTVSSESKYGPPCPPCPMFWVLVVVGGVLACYSLLVTVAFIIFWVKRGRKKLLYIFKQPFMRPVQTTQEEDGCSCRFEEEEGGCELRVKFSRSADAPAYQQGQNQLYNELNLGRREEYDVLDKRRGRDPEMGGKPRRKNPQEGLYNELQKDKMAEAYSEIGMKGERRRGKGHDGLYQGLSTATKDTYDALHMQALPPRLEGGGEGRGSLLTCGDVEENPGPRMLLLVTSLLLCELPHPAFLLIPRKVCNGIGIGEFKDSLSINATNIKHFKNCTSISGDLHILPVAFRGDSFTHTPPLDPQELDILKTVKEITGFLLIQAWPENRTDLHAFENLEIIRGRTKQHGQFSLAVVSLNITSLGLRSLKEISDGDVIISGNKNLCYANTINWKKLFGTSGQKTKIISNRGENSCKATGQVCHALCSPEGCWGPEPRDCVSCRNVSRGRECVDKCNLLEGEPREFVENSECIQCHPECLPQAMNITCTGRGPDNCIQCAHYIDGPHCVKTCPAGVMGENNTLVWKYADAGHVCHLCHPNCTYGCTGPGLEGCPTNGPKIPSIATGMVGALLLLLVVALGIGLFM

SEQ ID NO: 1940 - protein, 467 aa, Artificial Sequence
  source: /note="Description of Artificial Sequence: Synthetic polypeptide"
DIQMTQTTSSLSASLGDRVTISCRASQDISKYLNWYQQKPDGTVKLLIYHTSRLHSGVPSRFSGSGSGTDYSLTISNLEQEDIATYFCQQGNTLPYTFGGGTKLEITGSTSGSGKPGSGEGSTKGEVKLQESGPGLVAPSQSLSVTCTVSGVSLPDYGVSWIRQPPRKGLEWLGVIWGSETTYYNSALKSRLTIIKDNSKSQVFLKMNSLQTDDTAIYYCAKHYYYGGSYAMDYWGQGTSVTVSSAAAIEVMYPPPYLDNEKSNGTIIHVKGKHLCPSPLFPGPSKPFWVLVVVGGVLACYSLLVTVAFIIFWVRSKRSRLLHSDYMNMTPRRPGPTRKHYQPYAPPRDFAAYRSRVKFSRSADAPAYQQGQNQLYNELNLGRREEYDVLDKRRGRDPEMGGKPRRKNPQEGLYNELQKDKMAEAYSEIGMKGERRRGKGHDGLYQGLSTATKDTYDALHMQALPPR

SEQ ID NO: 1941 - protein, 111 aa, Artificial Sequence
  source: /note="Description of Artificial Sequence: Synthetic polypeptide"
ELVLTQSPKFMSTSVGDRVSVTCKASQNVGTNVAWYQQKPGQSPKPLIYSATYRNSGVPDRFTGSGSGTDFTLTITNVQSKDLADYFYFCQYNRYPYTSGGGTKLEIKRRS

SEQ ID NO: 1942 - DNA, 63 bp, Artificial Sequence
  source: /note="Description of Artificial Sequence: Synthetic oligonucleotide"
atggccctccctgtcaccgccctgctgcttccgctggctcttctgctccacgccgctcggccc

SEQ ID NO: 1943 - DNA, 72 bp, Artificial Sequence
  source: /note="Description of Artificial Sequence: Synthetic oligonucleotide"
atctacatttgggcccctctggctggtacttgcggggtcctgctgctttcactcgtgatcactctttactgt

SEQ ID NO: 1944 - DNA, 126 bp, Artificial Sequence
  source: /note="Description of Artificial Sequence: Synthetic polynucleotide"
aagcgcggtcggaagaagctgctgtacatctttaagcaacccttcatgaggcctgtgcagactactcaagaggaggacggctgttcatgccggttcccagaggaggaggaaggcggctgcgaactg

SEQ ID NO: 1945 - DNA, 336 bp, Artificial Sequence
  source: /note="Description of Artificial Sequence: Synthetic polynucleotide"
cgcgtgaaattcagccgcagcgcagatgctccagcctacaagcaggggcagaaccagctctacaacgaactcaatcttggtcggagagaggagtacgacgtgctggacaagcggagaggacgggacccagaaatgggcgggaagccgcgcagaaagaatccccaagagggcctgtacaacgagctccaaaaggataagatggcagaagcctatagcgagattggtatgaaaggggaacgcagaagaggcaaaggccacgacggactgtaccagggactcagcaccgccaccaaggacacctatgacgctcttcacatgcaggccctgccgcctcgg

SEQ ID NO: 1946 - RNA, 25 nt, Artificial Sequence
  source: /note="Description of Artificial Sequence: Synthetic oligonucleotide"
gcgcgcagcucacaccuggcggccg

SEQ ID NO: 1947 - RNA, 25 nt, Artificial Sequence
  source: /note="Description of Artificial Sequence: Synthetic oligonucleotide"
cucacaccuggcggccgcgguuucc

SEQ ID NO: 1948 - RNA, 25 nt, Artificial Sequence
  source: /note="Description of Artificial Sequence: Synthetic oligonucleotide"
acaccuggcggccgcgguuuccagg

SEQ ID NO: 1949 - RNA, 25 nt, Artificial Sequence
  source: /note="Description of Artificial Sequence: Synthetic oligonucleotide"
cggccgcgguuuccaggaggaagca

SEQ ID NO: 1950 - RNA, 25 nt, Artificial Sequence
  source: /note="Description of Artificial Sequence: Synthetic oligonucleotide"
uuuccaggaggaagcaaggaugcuu

SEQ ID NO: 1951 - RNA, 25 nt, Artificial Sequence
  source: /note="Description of Artificial Sequence: Synthetic oligonucleotide"
gcaaggaugcuuuggacacugugcg

SEQ ID NO: 1952 - RNA, 25 nt, Artificial Sequence
  source: /note="Description of Artificial Sequence: Synthetic oligonucleotide"
uuggacacugugcguggcgccuccg

SEQ ID NO: 1953 - RNA, 25 nt, Artificial Sequence
  source: /note="Description of Artificial Sequence: Synthetic oligonucleotide"
cgcggagcccccgcgcugccauucc

SEQ ID NO: 1954 - RNA, 25 nt, Artificial Sequence
  source: /note="Description of Artificial Sequence: Synthetic oligonucleotide"
cgcgcugccauucccggccgucgcu

SEQ ID NO: 1955 - RNA, 25 nt, Artificial Sequence
  source: /note="Description of Artificial Sequence: Synthetic oligonucleotide"
cggccgucgcucgguccuccgcuga

SEQ ID NO: 1956 - RNA, 25 nt, Artificial Sequence
  source: /note="Description of Artificial Sequence: Synthetic oligonucleotide"
ggccgucgcucgguccuccgcugac

SEQ ID NO: 1957 - RNA, 25 nt, Artificial Sequence
  source: /note="Description of Artificial Sequence: Synthetic oligonucleotide"
gcucgguccuccgcugacgggaagc

SEQ ID NO: 1958 - RNA, 25 nt, Artificial Sequence
  source: /note="Description of Artificial Sequence: Synthetic oligonucleotide"
uccuccgcugacgggaagcaggaag

SEQ ID NO: 1959 - RNA, 25 nt, Artificial Sequence
  source: /note="Description of Artificial Sequence: Synthetic oligonucleotide"
uccgcugacgggaagcaggaagugg

SEQ ID NO: 1960 - RNA, 25 nt, Artificial Sequence
  source: /note="Description of Artificial Sequence: Synthetic oligonucleotide"
gcugacgggaagcaggaaguggcgg

SEQ ID NO: 1961 - RNA, 25 nt, Artificial Sequence
  source: /note="Description of Artificial Sequence: Synthetic oligonucleotide"
cugacgggaagcaggaaguggcggc

SEQ ID NO: 1962 - RNA, 25 nt, Artificial Sequence
  source: /note="Description of Artificial Sequence: Synthetic oligonucleotide"
aggaaguggcggcgggcgucgcgag

SEQ ID NO: 1963 - RNA, 25 nt, Artificial Sequence
  source: /note="Description of Artificial Sequence: Synthetic oligonucleotide"
gcgggcgucgcgagcggugacauca

SEQ ID NO: 1964 - RNA, 25 nt, Artificial Sequence
  source: /note="Description of Artificial Sequence: Synthetic oligonucleotide"
cgggcgucgcgagcggugacaucac

SEQ ID NO: 1965 - RNA, 25 nt, Artificial Sequence
  source: /note="Description of Artificial Sequence: Synthetic oligonucleotide"
gggcgucgcgagcggugacaucacg

SEQ ID NO: 1966 - RNA, 25 nt, Artificial Sequence
  source: /note="Description of Artificial Sequence: Synthetic oligonucleotide"
ggcgucgcgagcggugacaucacgg

SEQ ID NO: 1967 - RNA, 25 nt, Artificial Sequence
  source: /note="Description of Artificial Sequence: Synthetic oligonucleotide"
gcgagcggugacaucacgggggcga

SEQ ID NO: 1968 - RNA, 25 nt, Artificial Sequence
  source: /note="Description of Artificial Sequence: Synthetic oligonucleotide"
agcggugacaucacgggggcgacgg

SEQ ID NO: 1969 - RNA, 25 nt, Artificial Sequence
  source: /note="Description of Artificial Sequence: Synthetic oligonucleotide"
gacaucacgggggcgacggcggcga

SEQ ID NO: 1970 - RNA, 25 nt, Artificial Sequence
  source: /note="Description of Artificial Sequence: Synthetic oligonucleotide"
acaucacgggggcgacggcggcgaa

SEQ ID NO: 1971 - RNA, 25 nt, Artificial Sequence
  source: /note="Description of Artificial Sequence: Synthetic oligonucleotide"
ucacgggggcgacggcggcgaaggg

SEQ ID NO: 1972 - RNA, 25 nt, Artificial Sequence
  source: /note="Description of Artificial Sequence: Synthetic oligonucleotide"
cacgggggcgacggcggcgaagggc

SEQ ID NO: 1973 - RNA, 25 nt, Artificial Sequence
  source: /note="Description of Artificial Sequence: Synthetic oligonucleotide"
acgggggcgacggcggcgaagggcg

SEQ ID NO: 1974 - RNA, 25 nt, Artificial Sequence
  source: /note="Description of Artificial Sequence: Synthetic oligonucleotide"
cgggggcgacggcggcgaagggcgg

SEQ ID NO: 1975 - RNA, 25 nt, Artificial Sequence
  source: /note="Description of Artificial Sequence: Synthetic oligonucleotide"
gggcgacggcggcgaagggcggggg

SEQ ID NO: 1976 - RNA, 25 nt, Artificial Sequence
  source: /note="Description of Artificial Sequence: Synthetic oligonucleotide"
cgacggcggcgaagggcgggggcgg

SEQ ID NO: 1977 - RNA, 25 nt, Artificial Sequence
  source: /note="Description of Artificial Sequence: Synthetic oligonucleotide"
cggcggcgaagggcgggggcggagg

SEQ ID NO: 1978 - RNA, 25 nt, Artificial Sequence
  source: /note="Description of Artificial Sequence: Synthetic oligonucleotide"
gggcgggggcggaggaggagcgagc

SEQ ID NO: 1979 - RNA, 25 nt, Artificial Sequence
  source: /note="Description of Artificial Sequence: Synthetic oligonucleotide"
ggcgggggcggaggaggagcgagcc

SEQ ID NO: 1980 - RNA, 25 nt, Artificial Sequence
  source: /note="Description of Artificial Sequence: Synthetic oligonucleotide"
ggggcggaggaggagcgagccgggc

SEQ ID NO: 1981 - RNA, 25 nt, Artificial Sequence
  source: /note="Description of Artificial Sequence: Synthetic oligonucleotide"
gggcggaggaggagcgagccgggcc

SEQ ID NO: 1982 - RNA, 25 nt, Artificial Sequence
  source: /note="Description of Artificial Sequence: Synthetic oligonucleotide"
ggcggaggaggagcgagccgggccg

SEQ ID NO: 1983 - RNA, 25 nt, Artificial Sequence
  source: /note="Description of Artificial Sequence: Synthetic oligonucleotide"
gcggaggaggagcgagccgggccgg

SEQ ID NO: 1984 - RNA, 25 nt, Artificial Sequence
  source: /note="Description of Artificial Sequence: Synthetic oligonucleotide"
cggaggaggagcgagccgggccggg

SEQ ID NO: 1985 - RNA, 25 nt, Artificial Sequence
  source: /note="Description of Artificial Sequence: Synthetic oligonucleotide"
ggccggggggcagcugcacagucuc

SEQ ID NO: 1986 - RNA, 25 nt, Artificial Sequence
  source: /note="Description of Artificial Sequence: Synthetic oligonucleotide"
gccggggggcagcugcacagucucc

SEQ ID NO: 1987 - RNA, 25 nt, Artificial Sequence
  source: /note="Description of Artificial Sequence: Synthetic oligonucleotide"
cagcugcacagucuccgggaucccc

SEQ ID NO: 1988 - RNA, 25 nt, Artificial Sequence
  source: /note="Description of Artificial Sequence: Synthetic oligonucleotide"
gcacagucuccgggauccccaggcc

SEQ ID NO: 1989 - RNA, 25 nt, Artificial Sequence
  source: /note="Description of Artificial Sequence: Synthetic oligonucleotide"
cagucuccgggauccccaggccugg

SEQ ID NO: 1990 - RNA, 25 nt, Artificial Sequence
  source: /note="Description of Artificial Sequence: Synthetic oligonucleotide"
agucuccgggauccccaggccugga

SEQ ID NO: 1991 - RNA, 25 nt, Artificial Sequence
  source: /note="Description of Artificial Sequence: Synthetic oligonucleotide"
gucuccgggauccccaggccuggag

SEQ ID NO: 1992 - RNA, 25 nt, Artificial Sequence
  source: /note="Description of Artificial Sequence: Synthetic oligonucleotide"
ucuccgggauccccaggccuggagg

SEQ ID NO: 1993 - RNA, 25 nt, Artificial Sequence
  source: /note="Description of Artificial Sequence: Synthetic oligonucleotide"
cuccgggauccccaggccuggaggg

SEQ ID NO: 1994 - RNA, 25 nt, Artificial Sequence
  source: /note="Description of Artificial Sequence: Synthetic oligonucleotide"
ccaggccuggaggggggucugugcg

SEQ ID NO: 1995 - RNA, 25 nt, Artificial Sequence
  source: /note="Description of Artificial Sequence: Synthetic oligonucleotide"
gccuggaggggggucugugcgcggc

SEQ ID NO: 1996 - RNA, 25 nt, Artificial Sequence
  source: /note="Description of Artificial Sequence: Synthetic oligonucleotide"
ggaggggggucugugcgcggccggc

SEQ ID NO: 1997 - RNA, 25 nt, Artificial Sequence
  source: /note="Description of Artificial Sequence: Synthetic oligonucleotide"
cggccggcuggcucugccccgcguc

SEQ ID NO: 1998 - RNA, 25 nt, Artificial Sequence
  source: /note="Description of Artificial Sequence: Synthetic oligonucleotide"
gcucugccccgcguccggucccgag

SEQ ID NO: 1999 - RNA, 25 nt, Artificial Sequence
  source: /note="Description of Artificial Sequence: Synthetic oligonucleotide"
cucugccccgcguccggucccgagc

SEQ ID NO: 2000 - RNA, 25 nt, Artificial Sequence
  source: /note="Description of Artificial Sequence: Synthetic oligonucleotide"
cguccggucccgagcgggccucccu

SEQ ID NO: 2001 - RNA, 25 nt, Artificial Sequence
  source: /note="Description of Artificial Sequence: Synthetic oligonucleotide"
guccggucccgagcgggccucccuc

SEQ ID NO: 2002 - RNA, 25 nt, Artificial Sequence
  source: /note="Description of Artificial Sequence: Synthetic oligonucleotide"
gccagcccgaugugaccgagcccag

SEQ ID NO: 2003 - RNA, 25 nt, Artificial Sequence
  source: /note="Description of Artificial Sequence: Synthetic oligonucleotide"
gaccgagcccagcggagccugagca

SEQ ID NO: 2004 - RNA, 25 nt, Artificial Sequence
  source: /note="Description of Artificial Sequence: Synthetic oligonucleotide"
agcccagcggagccugagcaaggag

SEQ ID NO: 2005 - RNA, 25 nt, Artificial Sequence
  source: /note="Description of Artificial Sequence: Synthetic oligonucleotide"
gcccagcggagccugagcaaggagc

SEQ ID NO: 2006 - RNA, 25 nt, Artificial Sequence
  source: /note="Description of Artificial Sequence: Synthetic oligonucleotide"
gccugagcaaggagcggguccgucg

SEQ ID NO: 2007 - RNA, 25 nt, Artificial Sequence
  source: /note="Description of Artificial Sequence: Synthetic oligonucleotide"
gcaaggagcggguccgucgcggagc

SEQ ID NO: 2008 - RNA, 25 nt, Artificial Sequence
  source: /note="Description of Artificial Sequence: Synthetic oligonucleotide"
aggagcggguccgucgcggagccgg

SEQ ID NO: 2009 - RNA, 25 nt, Artificial Sequence
  source: /note="Description of Artificial Sequence: Synthetic oligonucleotide"
ggagcggguccgucgcggagccgga

SEQ ID NO: 2010 - RNA, 25 nt, Artificial Sequence
  source: /note="Description of Artificial Sequence: Synthetic oligonucleotide"
gcggguccgucgcggagccggaggg

SEQ ID NO: 2011 - RNA, 25 nt, Artificial Sequence
  source: /note="Description of Artificial Sequence: Synthetic oligonucleotide"
cggguccgucgcggagccggagggc

SEQ ID NO: 2012 - RNA, 25 nt, Artificial Sequence
  source: /note="Description of Artificial Sequence: Synthetic oligonucleotide"
guccgucgcggagccggagggcggg

SEQ ID NO: 2013 - RNA, 25 nt, Artificial Sequence
  source: /note="Description of Artificial Sequence: Synthetic oligonucleotide"
ggagggcgggaggaacaugacaucg

SEQ ID NO: 2014 - RNA, 25 nt, Artificial Sequence
  source: /note="Description of Artificial Sequence: Synthetic oligonucleotide"
gggcgggaggaacaugacaucgcgg

SEQ ID NO: 2015 - RNA, 25 nt, Artificial Sequence
  source: /note="Description of Artificial Sequence: Synthetic oligonucleotide"
ggaggaacaugacaucgcggaggug

SEQ ID NO: 2016 - RNA, 25 nt, Artificial Sequence
  source: /note="Description of Artificial Sequence: Synthetic oligonucleotide"
gacaucgcggaggugaggagccccg

SEQ ID NO: 2017 - RNA, 25 nt, Artificial Sequence
  source: /note="Description of Artificial Sequence: Synthetic oligonucleotide"
acaucgcggaggugaggagccccga

SEQ ID NO: 2018 - RNA, 25 nt, Artificial Sequence
  source: /note="Description of Artificial Sequence: Synthetic oligonucleotide"
caucgcggaggugaggagccccgag

SEQ ID NO: 2019 - RNA, 25 nt, Artificial Sequence
  source: /note="Description of Artificial Sequence: Synthetic oligonucleotide"
cuuccuccuggaaaccgcggccgcc

SEQ ID NO: 2020 - RNA, 25 nt, Artificial Sequence
  source: /note="Description of Artificial Sequence: Synthetic oligonucleotide"
cauccuugcuuccuccuggaaaccg

SEQ ID NO: 2021 - RNA, 25 nt, Artificial Sequence
  source: /note="Description of Artificial Sequence: Synthetic oligonucleotide"
uguccaaagcauccuugcuuccucc

SEQ ID NO: 2022 - RNA, 25 nt, Artificial Sequence
  source: /note="Description of Artificial Sequence: Synthetic oligonucleotide"
gaauggcagcgcgggggcuccgcgg

SEQ ID NO: 2023 - RNA, 25 nt, Artificial Sequence
  source: /note="Description of Artificial Sequence: Synthetic oligonucleotide"
cgggaauggcagcgcgggggcuccg

SEQ ID NO: 2024 - RNA, 25 nt, Artificial Sequence
  source: /note="Description of Artificial Sequence: Synthetic oligonucleotide"
gcgacggccgggaauggcagcgcgg

SEQ ID NO: 2025 - RNA, 25 nt, Artificial Sequence
  source: /note="Description of Artificial Sequence: Synthetic oligonucleotide"
agcgacggccgggaauggcagcgcg

SEQ ID NO: 2026 - RNA, 25 nt, Artificial Sequence
  source: /note="Description of Artificial Sequence: Synthetic oligonucleotide"
gagcgacggccgggaauggcagcgc

SEQ ID NO: 2027 - RNA, 25 nt, Artificial Sequence
  source: /note="Description of Artificial Sequence: Synthetic oligonucleotide"
cgagcgacggccgggaauggcagcg

SEQ ID NO: 2028 - RNA, 25 nt, Artificial Sequence
  source: /note="Description of Artificial Sequence: Synthetic oligonucleotide"
cggaggaccgagcgacggccgggaa

SEQ ID NO: 2029 - RNA, 25 nt, Artificial Sequence
  source: /note="Description of Artificial Sequence: Synthetic oligonucleotide"
gucagcggaggaccgagcgacggcc

SEQ ID NO: 2030 - RNA, 25 nt, Artificial Sequence
  source: /note="Description of Artificial Sequence: Synthetic oligonucleotide"
cgucagcggaggaccgagcgacggc

SEQ ID NO: 2031 - RNA, 25 nt, Artificial Sequence
  source: /note="Description of Artificial Sequence: Synthetic oligonucleotide"
uucccgucagcggaggaccgagcga

SEQ ID NO: 2032 - RNA, 25 nt, Artificial Sequence
  source: /note="Description of Artificial Sequence: Synthetic oligonucleotide"
cggacuuccugcuucccgucagcgg

SEQ ID NO: 2033 - RNA, 25 nt, Artificial Sequence
  source: /note="Description of Artificial Sequence: Synthetic oligonucleotide"
cggcggacuuccugcuucccgucag

SEQ ID NO: 2034 - RNA, 25 nt, Artificial Sequence
  source: /note="Description of Artificial Sequence: Synthetic oligonucleotide"
gagacugugcagcugcgggggccgg

SEQ ID NO: 2035 - RNA, 25 nt, Artificial Sequence
  source: /note="Description of Artificial Sequence: Synthetic oligonucleotide"
ucccggagacugugcagcugcgggg

SEQ ID NO: 2036 - RNA, 25 nt, Artificial Sequence
  source: /note="Description of Artificial Sequence: Synthetic oligonucleotide"
gaccccccuccaggccuggggaucc

SEQ ID NO: 2037 - RNA, 25 nt, Artificial Sequence
  source: /note="Description of Artificial Sequence: Synthetic oligonucleotide"
gcgcacagaccccccuccaggccug

SEQ ID NO: 2038 - RNA, 25 nt, Artificial Sequence
  source: /note="Description of Artificial Sequence: Synthetic oligonucleotide"
cgcgcacagaccccccuccaggccu

SEQ ID NO: 2039 - RNA, 25 nt, Artificial Sequence
  source: /note="Description of Artificial Sequence: Synthetic oligonucleotide"
ccgcgcacagaccccccuccaggcc

SEQ ID NO: 2040 - RNA, 25 nt, Artificial Sequence
  source: /note="Description of Artificial Sequence: Synthetic oligonucleotide"
gccggccgcgcacagaccccccucc

SEQ ID NO: 2041 - RNA, 25 nt, Artificial Sequence
  source: /note="Description of Artificial Sequence: Synthetic oligonucleotide"
ggaccggacgcggggcagagccagc

SEQ ID NO: 2042 - RNA, 25 nt, Artificial Sequence
  source: /note="Description of Artificial Sequence: Synthetic oligonucleotide"
ggaggcccgcucgggaccggacgcg

SEQ ID NO: 2043 - RNA, 25 nt, Artificial Sequence
  source: /note="Description of Artificial Sequence: Synthetic oligonucleotide"
gggaggcccgcucgggaccggacgc

SEQ ID NO: 2044 - RNA, 25 nt, Artificial Sequence
  source: /note="Description of Artificial Sequence: Synthetic oligonucleotide"
agggaggcccgcucgggaccggacg

SEQ ID NO: 2045 - RNA, 25 nt, Artificial Sequence
  source: /note="Description of Artificial Sequence: Synthetic oligonucleotide"
ggcccgagggaggcccgcucgggac

SEQ ID NO: 2046 - RNA, 25 nt, Artificial Sequence
  source: /note="Description of Artificial Sequence: Synthetic oligonucleotide"
gggcuggcccgagggaggcccgcuc

SEQ ID NO: 2047 - RNA, 25 nt, Artificial Sequence
  source: /note="Description of Artificial Sequence: Synthetic oligonucleotide"
cgggcuggcccgagggaggcccgcu

SEQ ID NO: 2048 - RNA, 25 nt, Artificial Sequence
  source: /note="Description of Artificial Sequence: Synthetic oligonucleotide"
cggucacaucgggcuggcccgaggg

SEQ ID NO: 2049 - RNA, 25 nt, Artificial Sequence
  source: /note="Description of Artificial Sequence: Synthetic oligonucleotide"
gcucggucacaucgggcuggcccga

SEQ ID NO: 2050 - RNA, 25 nt, Artificial Sequence
  source: /note="Description of Artificial Sequence: Synthetic oligonucleotide"
ggcucggucacaucgggcuggcccg

SEQ ID NO: 2051 - RNA, 25 nt, Artificial Sequence
  source: /note="Description of Artificial Sequence: Synthetic oligonucleotide"
uccgcugggcucggucacaucgggc

SEQ ID NO: 2052 - RNA, 25 nt, Artificial Sequence
  source: /note="Description of Artificial Sequence: Synthetic oligonucleotide"
aggcuccgcugggcucggucacauc

SEQ ID NO: 2053 - RNA, 25 nt, Artificial Sequence
  source: /note="Description of Artificial Sequence: Synthetic oligonucleotide"
caggcuccgcugggcucggucacau

SEQ ID NO: 2054 - RNA, 25 nt, Artificial Sequence
  source: /note="Description of Artificial Sequence: Synthetic oligonucleotide"
cuccuugcucaggcuccgcugggcu

SEQ ID NO: 2055 - RNA, 25 nt, Artificial Sequence
  source: /note="Description of Artificial Sequence: Synthetic oligonucleotide"
acccgcuccuugcucaggcuccgcu

SEQ ID NO: 2056 - RNA, 25 nt, Artificial Sequence
  source: /note="Description of Artificial Sequence: Synthetic oligonucleotide"
gacccgcuccuugcucaggcuccgc

SEQ ID NO: 2057 - RNA, 25 nt, Artificial Sequence
  source: /note="Description of Artificial Sequence: Synthetic oligonucleotide"
uccgcgacggacccgcuccuugcuc

SEQ ID NO: 2058 - RNA, 25 nt, Artificial Sequence
  source: /note="Description of Artificial Sequence: Synthetic oligonucleotide"
uuccucccgcccuccggcuccgcga

SEQ ID NO: 2059 - RNA, 25 nt, Artificial Sequence
  source: /note="Description of Artificial Sequence: Synthetic oligonucleotide"
gcgaugucauguuccucccgcccuc

SEQ ID NO: 2060 - RNA, 25 nt, Artificial Sequence
  source: /note="Description of Artificial Sequence: Synthetic oligonucleotide"
uaagaugguuucacccaaauaucac

SEQ ID NO: 2061 - RNA, 25 nt, Artificial Sequence
  source: /note="Description of Artificial Sequence: Synthetic oligonucleotide"
ugguuucacccaaauaucacuggug

SEQ ID NO: 2062 - RNA, 25 nt, Artificial Sequence
  source: /note="Description of Artificial Sequence: Synthetic oligonucleotide"
uuucacccaaauaucacuggugugg

SEQ ID NO: 2063 - RNA, 25 nt, Artificial Sequence
  source: /note="Description of Artificial Sequence: Synthetic oligonucleotide"
aggcagaaaaccuacuguugacaag

SEQ ID NO: 2064 - RNA, 25 nt, Artificial Sequence
  source: /note="Description of Artificial Sequence: Synthetic oligonucleotide"
accuacuguugacaagaggaguuga

SEQ ID NO: 2065 - RNA, 25 nt, Artificial Sequence
  source: /note="Description of Artificial Sequence: Synthetic oligonucleotide"
acaagaggaguugauggcaguuuuu

SEQ ID NO: 2066 - RNA, 25 nt, Artificial Sequence
  source: /note="Description of Artificial Sequence: Synthetic oligonucleotide"
aggaguugauggcaguuuuuuggca

SEQ ID NO: 2067 - RNA, 25 nt, Artificial Sequence
  source: /note="Description of Artificial Sequence: Synthetic oligonucleotide"
uggcaaggccuaguaaaaguaaccc

SEQ ID NO: 2068 - RNA, 25 nt, Artificial Sequence
  source: /note="Description of Artificial Sequence: Synthetic oligonucleotide"
cccuggagacuucacacuuuccguu

SEQ ID NO: 2069 - RNA, 25 nt, Artificial Sequence
  source: /note="Description of Artificial Sequence: Synthetic oligonucleotide"
acuucacacuuuccguuagguaagu

SEQ ID NO: 2070 - RNA, 25 nt, Artificial Sequence
  source: /note="Description of Artificial Sequence: Synthetic oligonucleotide"
uucugccuccacaccagugauauuu

SEQ ID NO: 2071 - RNA, 25 nt, Artificial Sequence
  source: /note="Description of Artificial Sequence: Synthetic oligonucleotide"
uuucugccuccacaccagugauauu

SEQ ID NO: 2072 - RNA, 25 nt, Artificial Sequence
  source: /note="Description of Artificial Sequence: Synthetic oligonucleotide"
gccaucaacuccucuugucaacagu

SEQ ID NO: 2073 - RNA, 25 nt, Artificial Sequence
  source: /note="Description of Artificial Sequence: Synthetic oligonucleotide"
ugaagucuccaggguuacuuuuacu

SEQ ID NO: 2074 - RNA, 25 nt, Artificial Sequence
  source: /note="Description of Artificial Sequence: Synthetic oligonucleotide"
ccuaacggaaagugugaagucucca

SEQ ID NO: 2075 - RNA, 25 nt, Artificial Sequence
  source: /note="Description of Artificial Sequence: Synthetic oligonucleotide"
accuaacggaaagugugaagucucc

SEQ ID NO: 2076 - RNA, 25 nt, Artificial Sequence
  source: /note="Description of Artificial Sequence: Synthetic oligonucleotide"
uuccaauggacuauuuuagaagaaa

SEQ ID NO: 2077 - RNA, 25 nt, Artificial Sequence
  source: /note="Description of Artificial Sequence: Synthetic oligonucleotide"
ucacccacaucaagauucagaacac

SEQ ID NO: 2078 - RNA, 25 nt, Artificial Sequence
  source: /note="Description of Artificial Sequence: Synthetic oligonucleotide"
acacuggugauuacuaugaccugua

SEQ ID NO: 2079 - RNA, 25 nt, Artificial Sequence
  source: /note="Description of Artificial Sequence: Synthetic oligonucleotide"
cuggugauuacuaugaccuguaugg

SEQ ID NO: 2080 - RNA, 25 nt, Artificial Sequence
  source: /note="Description of Artificial Sequence: Synthetic oligonucleotide"
uggugauuacuaugaccuguaugga

SEQ ID NO: 2081 - RNA, 25 nt, Artificial Sequence
  source: /note="Description of Artificial Sequence: Synthetic oligonucleotide"
ggugauuacuaugaccuguauggag

SEQ ID NO: 2082 - RNA, 25 nt, Artificial Sequence
  source: /note="Description of Artificial Sequence: Synthetic oligonucleotide"
uauggaggggagaaauuugccacuu

SEQ ID NO: 2083 - RNA, 25 nt, Artificial Sequence
  source: /note="Description of Artificial Sequence: Synthetic oligonucleotide"
gagaaauuugccacuuuggcugagu

SEQ ID NO: 2084 - RNA, 25 nt, Artificial Sequence
  source: /note="Description of Artificial Sequence: Synthetic oligonucleotide"
uuggcugaguugguccaguauuaca

SEQ ID NO: 2085 - RNA, 25 nt, Artificial Sequence
  source: /note="Description of Artificial Sequence: Synthetic oligonucleotide"
ugguccaguauuacauggaacauca

SEQ ID NO: 2086 - RNA, 25 nt, Artificial Sequence
  source: /note="Description of Artificial Sequence: Synthetic oligonucleotide"
gguccaguauuacauggaacaucac

SEQ ID NO: 2087 - RNA, 25 nt, Artificial Sequence
  source: /note="Description of Artificial Sequence: Synthetic oligonucleotide"
aucacgggcaauuaaaagagaagaa

SEQ ID NO: 2088 - RNA, 25 nt, Artificial Sequence
  source: /note="Description of Artificial Sequence: Synthetic oligonucleotide"
gaacugugcagauccuaccucugaa

SEQ ID NO: 2089 - RNA, 25 nt, Artificial Sequence
  source: /note="Description of Artificial Sequence: Synthetic oligonucleotide"
cuccauuucuucuaaaauaguccau

SEQ ID NO: 2090 - RNA, 25 nt, Artificial Sequence
  source: /note="Description of Artificial Sequence: Synthetic oligonucleotide"
ucaccaguguucugaaucuugaugu

SEQ ID NO: 2091 - RNA, 25 nt, Artificial Sequence
  source: /note="Description of Artificial Sequence: Synthetic oligonucleotide"
aucaccaguguucugaaucuugaug

SEQ ID NO: 2092 - RNA, 25 nt, Artificial Sequence
  source: /note="Description of Artificial Sequence: Synthetic oligonucleotide"
aguggcaaauuucuccccuccauac

SEQ ID NO: 2093 - RNA, 25 nt, Artificial Sequence
  source: /note="Description of Artificial Sequence: Synthetic oligonucleotide"
uaauacuggaccaacucagccaaag

SEQ ID NO: 2094 - RNA, 25 nt, Artificial Sequence
  source: /note="Description of Artificial Sequence: Synthetic oligonucleotide"
uugcccgugauguuccauguaauac

SEQ ID NO: 2095 - RNA, 25 nt, Artificial Sequence
  source: /note="Description of Artificial Sequence: Synthetic oligonucleotide"
cagagguaggaucugcacaguucag

SEQ ID NO: 2096 - RNA, 25 nt, Artificial Sequence
  source: /note="Description of Artificial Sequence: Synthetic oligonucleotide"
aaaauguuacugaccuuucagaggu

SEQ ID NO: 2097 - RNA, 25 nt, Artificial Sequence
  source: /note="Description of Artificial Sequence: Synthetic oligonucleotide"
cacuaaaauguuacugaccuuucag

SEQ ID NO: 2098 - RNA, 25 nt, Artificial Sequence
  source: /note="Description of Artificial Sequence: Synthetic oligonucleotide"
uuuuuaaaaacuuuaggugguuuca

SEQ ID NO: 2099 - RNA, 25 nt, Artificial Sequence
  source: /note="Description of Artificial Sequence: Synthetic oligonucleotide"
uuaggugguuucauggacaucucuc

SEQ ID NO: 2100 - RNA, 25 nt, Artificial Sequence
  source: /note="Description of Artificial Sequence: Synthetic oligonucleotide"
uaggugguuucauggacaucucucu

SEQ ID NO: 2101 - RNA, 25 nt, Artificial Sequence
  source: /note="Description of Artificial Sequence: Synthetic oligonucleotide"
aagcagagaaauuauuaacugaaaa

SEQ ID NO: 2102 - RNA, 25 nt, Artificial Sequence
  source: /note="Description of Artificial Sequence: Synthetic oligonucleotide"
aauuauuaacugaaaaaggaaaaca

SEQ ID NO: 2103 - RNA, 25 nt, Artificial Sequence
  source: /note="Description of Artificial Sequence: Synthetic oligonucleotide"
uuguacgagagagccagagccaccc

SEQ ID NO: 2104 - RNA, 25 nt, Artificial Sequence
  source: /note="Description of Artificial Sequence: Synthetic oligonucleotide"
gagauuuuguucuuucugugcgcac

SEQ ID NO: 2105 - RNA, 25 nt, Artificial Sequence
  source: /note="Description of Artificial Sequence: Synthetic oligonucleotide"
uuucugugcgcacuggugaugacaa

SEQ ID NO: 2106 - RNA, 25 nt, Artificial Sequence
  source: /note="Description of Artificial Sequence: Synthetic oligonucleotide"
uucugugcgcacuggugaugacaaa

SEQ ID NO: 2107 - RNA, 25 nt, Artificial Sequence
  source: /note="Description of Artificial Sequence: Synthetic oligonucleotide"
ucugugcgcacuggugaugacaaag

SEQ ID NO: 2108 - RNA, 25 nt, Artificial Sequence
  source: /note="Description of Artificial Sequence: Synthetic oligonucleotide"
gugaugacaaaggggagagcaauga

SEQ ID NO: 2109 - RNA, 25 nt, Artificial Sequence
  source: /note="Description of Artificial Sequence: Synthetic oligonucleotide"
gugacccauguuaugauucgcuguc

SEQ ID NO: 2110 - RNA, 25 nt, Artificial Sequence
  source: /note="Description of Artificial Sequence: Synthetic oligonucleotide"
aagaacaaaaucuccaggguggcuc

SEQ ID NO: 2111 - RNA, 25 nt, Artificial Sequence
  source: /note="Description of Artificial Sequence: Synthetic oligonucleotide"
cacagaaagaacaaaaucuccaggg

SEQ ID NO: 2112 - RNA, 25 nt, Artificial Sequence
  source: /note="Description of Artificial Sequence: Synthetic oligonucleotide"
gcgcacagaaagaacaaaaucucca

SEQ ID NO: 2113 - RNA, 25 nt, Artificial Sequence
  source: /note="Description of Artificial Sequence: Synthetic oligonucleotide"
ugcgcacagaaagaacaaaaucucc

SEQ ID NO: 2114 - RNA, 25 nt, Artificial Sequence
  source: /note="Description of Artificial Sequence: Synthetic oligonucleotide"
uuuaccugacagcgaaucauaacau

SEQ ID NO: 2115 - RNA, 25 nt, Artificial Sequence
  source: /note="Description of Artificial Sequence: Synthetic oligonucleotide"
auuuaccugacagcgaaucauaaca

SEQ ID NO: 2116 - RNA, 25 nt, Artificial Sequence
  source: /note="Description of Artificial Sequence: Synthetic oligonucleotide"
cuugaaaggaacugaaauacgacgu

SEQ ID NO: 2117 - RNA, 25 nt, Artificial Sequence
  source: /note="Description of Artificial Sequence: Synthetic oligonucleotide"
gaaaggaacugaaauacgacguugg

SEQ ID NO: 2118 - RNA, 25 nt, Artificial Sequence
  source: /note="Description of Artificial Sequence: Synthetic oligonucleotide"
aggaacugaaauacgacguuggugg

SEQ ID NO: 2119 - RNA, 25 nt, Artificial Sequence
  source: /note="Description of Artificial Sequence: Synthetic oligonucleotide"
gaaauacgacguugguggaggagaa

SEQ ID NO: 2120 - RNA, 25 nt, Artificial Sequence
  source: /note="Description of Artificial Sequence: Synthetic oligonucleotide"
cgguuugauucuuugacagaucuug

SEQ ID NO: 2121 - RNA, 25 nt, Artificial Sequence
  source: /note="Description of Artificial Sequence: Synthetic oligonucleotide"
guggaacauuauaagaagaauccua

SEQ ID NO: 2122 - RNA, 25 nt, Artificial Sequence
  source: /note="Description of Artificial Sequence: Synthetic oligonucleotide"
gaacauuauaagaagaauccuaugg

SEQ ID NO: 2123 - RNA, 25 nt, Artificial Sequence
  source: /note="Description of Artificial Sequence: Synthetic oligonucleotide"
aagaagaauccuaugguggaaacau

SEQ ID NO: 2124 - RNA, 25 nt, Artificial Sequence
  source: /note="Description of Artificial Sequence: Synthetic oligonucleotide"
agaagaauccuaugguggaaacauu

SEQ ID NO: 2125 - RNA, 25 nt, Artificial Sequence
  source: /note="Description of Artificial Sequence: Synthetic oligonucleotide"
uuggguacaguacuacaacucaagc

SEQ ID NO: 2126 - RNA, 25 nt, Artificial Sequence
  source: /note="Description of Artificial Sequence: Synthetic oligonucleotide"
cuacaacucaagcaggugagcagau

SEQ ID NO: 2127 - RNA, 25 nt, Artificial Sequence
  source: /note="Description of Artificial Sequence: Synthetic oligonucleotide"
guacuguacccaauguuuccaccau

SEQ ID NO: 2128 - RNA, 25 nt, Artificial Sequence
  source: /note="Description of Artificial Sequence: Synthetic oligonucleotide"
cugagaccacagauaaagucaaaca

SEQ ID NO: 2129 - RNA, 25 nt, Artificial Sequence
  source: /note="Description of Artificial Sequence: Synthetic oligonucleotide"
cacagauaaagucaaacaaggcuuu

SEQ ID NO: 2130 - RNA, 25 nt, Artificial Sequence
  source: /note="Description of Artificial Sequence: Synthetic oligonucleotide"
acagauaaagucaaacaaggcuuuu

SEQ ID NO: 2131 - RNA, 25 nt, Artificial Sequence
  source: /note="Description of Artificial Sequence: Synthetic oligonucleotide"
aaacaaggcuuuugggaagaauuug

SEQ ID NO: 2132 - RNA, 25 nt, Artificial Sequence
  source: /note="Description of Artificial Sequence: Synthetic oligonucleotide"
cagcauuuauacgagucguguuaag

SEQ ID NO: 2133 - RNA, 25 nt, Artificial Sequence
  source: /note="Description of Artificial Sequence: Synthetic oligonucleotide"
gcagcauuuauacgagucguguuaa

SEQ ID NO: 2134 - RNA, 25 nt, Artificial Sequence
  source: /note="Description of Artificial Sequence: Synthetic oligonucleotide"
agcagcauuuauacgagucguguua

SEQ ID NO: 2135 - RNA, 25 nt, Artificial Sequence
  source: /note="Description of Artificial Sequence: Synthetic oligonucleotide"
caaaagccuuguuugacuuuaucug

SEQ ID NO: 2136 - RNA, 25 nt, Artificial Sequence
  source: /note="Description of Artificial Sequence: Synthetic oligonucleotide"
cuuucuuuccagacacuacaacaac

SEQ ID NO: 2137 - RNA, 25 nt, Artificial Sequence
  source: /note="Description of Artificial Sequence: Synthetic oligonucleotide"
ugcaaacuucucuacagccgaaaag

SEQ ID NO: 2138 - RNA, 25 nt, Artificial Sequence
  source: /note="Description of Artificial Sequence: Synthetic oligonucleotide"
gcaaacuucucuacagccgaaaaga

SEQ ID NO: 2139 - RNA, 25 nt, Artificial Sequence
  source: /note="Description of Artificial Sequence: Synthetic oligonucleotide"
ucucuacagccgaaaagagggucaa

SEQ ID NO: 2140 - RNA, 25 nt, Artificial Sequence
  source: /note="Description of Artificial Sequence: Synthetic oligonucleotide"
uuugcacuccuguuguuguaguguc

SEQ ID NO: 2141 - RNA, 25 nt, Artificial Sequence
  source: /note="Description of Artificial Sequence: Synthetic oligonucleotide"
guuuucuugccuuugacccucuuuu

SEQ ID NO: 2142 - RNA, 25 nt, Artificial Sequence
  source: /note="Description of Artificial Sequence: Synthetic oligonucleotide"
agcggaauauugauacuuacagggc

SEQ ID NO: 2143 - RNA, 25 nt, Artificial Sequence
  source: /note="Description of Artificial Sequence: Synthetic oligonucleotide"
ucuuuuucuucuaguugaucauacc

SEQ ID NO: 2144 - RNA, 25 nt, Artificial Sequence
  source: /note="Description of Artificial Sequence: Synthetic oligonucleotide"
cuuuuucuucuaguugaucauacca

SEQ ID NO: 2145 - RNA, 25 nt, Artificial Sequence
  source: /note="Description of Artificial Sequence: Synthetic oligonucleotide"
aucauaccaggguuguccuacacga

SEQ ID NO: 2146 - RNA, 25 nt, Artificial Sequence
  source: /note="Description of Artificial Sequence: Synthetic oligonucleotide"
gauuacaucaaugcaaauaucauca

SEQ ID NO: 2147 - RNA, 25 nt, Artificial Sequence
  source: /note="Description of Artificial Sequence: Synthetic oligonucleotide"
ggaucaccaucguguaggacaaccc

SEQ ID NO: 2148 - RNA, 25 nt, Artificial Sequence
  source: /note="Description of Artificial Sequence: Synthetic oligonucleotide"
aggcucauugggaucaccaucgugu

SEQ ID NO: 2149 - RNA, 25 nt, Artificial Sequence
  source: /note="Description of Artificial Sequence: Synthetic oligonucleotide"
ugauguaaucugaaacaggcucauu

SEQ ID NO: 2150 - RNA, 25 nt, Artificial Sequence
  source: /note="Description of Artificial Sequence: Synthetic oligonucleotide"
uugauguaaucugaaacaggcucau

SEQ ID NO: 2151 - RNA, 25 nt, Artificial Sequence
  source: /note="Description of Artificial Sequence: Synthetic oligonucleotide"
uauuugcauugauguaaucugaaac

SEQ ID NO: 2152 - RNA, 25 nt, Artificial Sequence
  source: /note="Description of Artificial Sequence: Synthetic oligonucleotide"
ccaaaaagaguuacauugccacaca

SEQ ID NO: 2153 - RNA, 25 nt, Artificial Sequence
  source: /note="Description of Artificial Sequence: Synthetic oligonucleotide"
gccacacaaggcugccugcaaaaca

SEQ ID NO: 2154 - RNA, 25 nt, Artificial Sequence
  source: /note="Description of Artificial Sequence: Synthetic oligonucleotide"
ccugcaaaacacggugaaugacuuu

SEQ ID NO: 2155 - RNA, 25 nt, Artificial Sequence
  source: /note="Description of Artificial Sequence: Synthetic oligonucleotide"
gcaaaacacggugaaugacuuuugg

SEQ ID NO: 2156 - RNA, 25 nt, Artificial Sequence
  source: /note="Description of Artificial Sequence: Synthetic oligonucleotide"
aacacggugaaugacuuuuggcgga

SEQ ID NO: 2157 - RNA, 25 nt, Artificial Sequence
  source: /note="Description of Artificial Sequence: Synthetic oligonucleotide"
gugauugucaugacaacgaaagaag

SEQ ID NO: 2158 - RNA, 25 nt, Artificial Sequence
  source: /note="Description of Artificial Sequence: Synthetic oligonucleotide"
ucaugacaacgaaagaaguggagag

SEQ ID NO: 2159 - RNA, 25 nt, Artificial Sequence
  source: /note="Description of Artificial Sequence: Synthetic oligonucleotide"
acaacgaaagaaguggagagaggaa

SEQ ID NO: 2160 - RNA, 25 nt, Artificial Sequence
  source: /note="Description of Artificial Sequence: Synthetic oligonucleotide"
gguuucaaauucaggcuagaaauuu

SEQ ID NO: 2161 - RNA, 25 nt, Artificial Sequence
  source: /note="Description of Artificial Sequence: Synthetic oligonucleotide"
aauuguugcacuugguuucaaauuc

SEQ ID NO: 2162 - RNA, 25 nt, Artificial Sequence
  source: /note="Description of Artificial Sequence: Synthetic oligonucleotide"
uuuuugggcuuugaauuguugcacu

SEQ ID NO: 2163 - RNA, 25 nt, Artificial Sequence
  source: /note="Description of Artificial Sequence: Synthetic oligonucleotide"
cuuguguggcaauguaacucuuuuu

SEQ ID NO: 2164 - RNA, 25 nt, Artificial Sequence
  source: /note="Description of Artificial Sequence: Synthetic oligonucleotide"
ccuuguguggcaauguaacucuuuu

SEQ ID NO: 2165 - RNA, 25 nt, Artificial Sequence
  source: /note="Description of Artificial Sequence: Synthetic oligonucleotide"
accguguuuugcaggcagccuugug

SEQ ID NO: 2166 - RNA, 25 nt, Artificial Sequence
  source: /note="Description of Artificial Sequence: Synthetic oligonucleotide"
ccaaaagucauucaccguguuuugc

SEQ ID NO: 2167 - RNA, 25 nt, Artificial Sequence
  source: /note="Description of Artificial Sequence: Synthetic oligonucleotide"
caugacaaucacucgggaguuuucu

SEQ ID NO: 2168 - RNA, 25 nt, Artificial Sequence
  source: /note="Description of Artificial Sequence: Synthetic oligonucleotide"
ucuuucguugucaugacaaucacuc

SEQ ID NO: 2169 - RNA, 25 nt, Artificial Sequence
  source: /note="Description of Artificial Sequence: Synthetic oligonucleotide"
uucuuucguugucaugacaaucacu

SEQ ID NO: 2170 - RNA, 25 nt, Artificial Sequence
  source: /note="Description of Artificial Sequence: Synthetic oligonucleotide"
cuuccagaguaaaugugucaaauac

SEQ ID NO: 2171 - RNA, 25 nt, Artificial Sequence
  source: /note="Description of Artificial Sequence: Synthetic oligonucleotide"
cugaugaguaugcucuaaaagaaua

SEQ ID NO: 2172 - RNA, 25 nt, Artificial Sequence
  source: /note="Description of Artificial Sequence: Synthetic oligonucleotide"
aaaagaauauggcgucaugcguguu

SEQ ID NO: 2173 - RNA, 25 nt, Artificial Sequence
  source: /note="Description of Artificial Sequence: Synthetic oligonucleotide"
acgcuaagagaacuuaaacuuucaa

SEQ ID NO: 2174 - RNA, 25 nt, Artificial Sequence
  source: /note="Description of Artificial Sequence: Synthetic oligonucleotide"
uaagagaacuuaaacuuucaaaggu

SEQ ID NO: 2175 - RNA, 25 nt, Artificial Sequence
  source: /note="Description of Artificial Sequence: Synthetic oligonucleotide"
aggccaguauuugacacauuuacuc

SEQ ID NO: 2176 - RNA, 25 nt, Artificial Sequence
  source: /note="Description of Artificial Sequence: Synthetic oligonucleotide"
cauauucuuuuagagcauacucauc

SEQ ID NO: 2177 - RNA, 25 nt, Artificial Sequence
  source: /note="Description of Artificial Sequence: Synthetic oligonucleotide"
aguucucuuagcguauagucaugag

SEQ ID NO: 2178 - RNA, 25 nt, Artificial Sequence
  source: /note="Description of Artificial Sequence: Synthetic oligonucleotide"
uucuuggcucuacuccaggggaaua

SEQ ID NO: 2179 - RNA, 25 nt, Artificial Sequence
  source: /note="Description of Artificial Sequence: Synthetic oligonucleotide"
cuacuccaggggaauacggagagaa

SEQ ID NO: 2180 - RNA, 25 nt, Artificial Sequence
  source: /note="Description of Artificial Sequence: Synthetic oligonucleotide"
ccaggggaauacggagagaacgguc

SEQ ID NO: 2181 - RNA, 25 nt, Artificial Sequence
  source: /note="Description of Artificial Sequence: Synthetic oligonucleotide"
gagaacggucuggcaauaccacuuu

SEQ ID NO: 2182 - RNA, 25 nt, Artificial Sequence
  source: /note="Description of Artificial Sequence: Synthetic oligonucleotide"
ggucuggcaauaccacuuucggacc

SEQ ID NO: 2183 - RNA, 25 nt, Artificial Sequence
  source: /note="Description of Artificial Sequence: Synthetic oligonucleotide"
uggcaauaccacuuucggaccuggc

SEQ ID NO: 2184 - RNA, 25 nt, Artificial Sequence
  source: /note="Description of Artificial Sequence: Synthetic oligonucleotide"
accacuuucggaccuggccggacca

SEQ ID NO: 2185 - RNA, 25 nt, Artificial Sequence
  source: /note="Description of Artificial Sequence: Synthetic oligonucleotide"
cggaccacggcgugcccagcgaccc

SEQ ID NO: 2186 - RNA, 25 nt, Artificial Sequence
  source: /note="Description of Artificial Sequence: Synthetic oligonucleotide"
ggaccacggcgugcccagcgacccu

SEQ ID NO: 2187 - RNA, 25 nt, Artificial Sequence
  source: /note="Description of Artificial Sequence: Synthetic oligonucleotide"
gaccacggcgugcccagcgacccug

SEQ ID NO: 2188 - RNA, 25 nt, Artificial Sequence
  source: /note="Description of Artificial Sequence: Synthetic oligonucleotide"
accacggcgugcccagcgacccugg

SEQ ID NO: 2189 - RNA, 25 nt, Artificial Sequence
  source: /note="Description of Artificial Sequence: Synthetic oligonucleotide"
gugcccagcgacccugggggcgugc

SEQ ID NO: 2190 - RNA, 25 nt, Artificial Sequence
  source: /note="Description of Artificial Sequence: Synthetic oligonucleotide"
gacccugggggcgugcuggacuucc

SEQ ID NO: 2191 - RNA, 25 nt, Artificial Sequence
  source: /note="Description of Artificial Sequence: Synthetic oligonucleotide"
ccugggggcgugcuggacuuccugg

SEQ ID NO: 2192 - RNA, 25 nt, Artificial Sequence
  source: /note="Description of Artificial Sequence: Synthetic oligonucleotide"
gggggcgugcuggacuuccuggagg

SEQ ID NO: 2193 - RNA, 25 nt, Artificial Sequence
  source: /note="Description of Artificial Sequence: Synthetic oligonucleotide"
uuccuggaggaggugcaccauaagc

SEQ ID NO: 2194 - RNA, 25 nt, Artificial Sequence
  source: /note="Description of Artificial Sequence: Synthetic oligonucleotide"
gugcaccauaagcaggagagcauca

SEQ ID NO: 2195 - RNA, 25 nt, Artificial Sequence
  source: /note="Description of Artificial Sequence: Synthetic oligonucleotide"
auaagcaggagagcaucauggaugc

SEQ ID NO: 2196 - RNA, 25 nt, Artificial Sequence
  source: /note="Description of Artificial Sequence: Synthetic oligonucleotide"
uaagcaggagagcaucauggaugca

SEQ ID NO: 2197 - RNA, 25 nt, Artificial Sequence
  source: /note="Description of Artificial Sequence: Synthetic oligonucleotide"
caggagagcaucauggaugcagggc

SEQ ID NO: 2198 - RNA, 25 nt, Artificial Sequence
  source: /note="Description of Artificial Sequence: Synthetic oligonucleotide"
agcaucauggaugcagggccggucg

SEQ ID NO: 2199 - RNA, 25 nt, Artificial Sequence
  source: /note="Description of Artificial Sequence: Synthetic oligonucleotide"
ugcagggccggucguggugcacugc

SEQ ID NO: 2200 - RNA, 25 nt, Artificial Sequence
  source: /note="Description of Artificial Sequence: Synthetic oligonucleotide"
aggugacagcuccugcugccccucu

SEQ ID NO: 2201 - RNA, 25 nt, Artificial Sequence
  source: /note="Description of Artificial Sequence: Synthetic oligonucleotide"
agccugucccugucuccuagcgccc

SEQ ID NO: 2202 - RNA, 25 nt, Artificial Sequence
  source: /note="Description of Artificial Sequence: Synthetic oligonucleotide"
gccugucccugucuccuagcgccca

SEQ ID NO: 2203 - RNA, 25 nt, Artificial Sequence
  source: /note="Description of Artificial Sequence: Synthetic oligonucleotide"
uacccacuccuagcucuuuaacugu

SEQ ID NO: 2204 - RNA, 25 nt, Artificial Sequence
  source: /note="Description of Artificial Sequence: Synthetic oligonucleotide"
guaggaagaauuuaauaucuguuug

SEQ ID NO: 2205 - RNA, 25 nt, Artificial Sequence
  source: /note="Description of Artificial Sequence: Synthetic oligonucleotide"
uuugaggcauagagcaacugcauug

SEQ ID NO: 2206 - RNA, 25 nt, Artificial Sequence
  source: /note="Description of Artificial Sequence: Synthetic oligonucleotide"
uugaggcauagagcaacugcauuga

SEQ ID NO: 2207 - RNA, 25 nt, Artificial Sequence
  source: /note="Description of Artificial Sequence: Synthetic oligonucleotide"
ugcauugagggacauuuugauccca

SEQ ID NO: 2208 - RNA, 25 nt, Artificial Sequence
  source: /note="Description of Artificial Sequence: Synthetic oligonucleotide"
cuccuagacccuacagcacugccau

SEQ ID NO: 2209 - RNA, 25 nt, Artificial Sequence
  source: /note="Description of Artificial Sequence: Synthetic oligonucleotide"
gacccuacagcacugccauuggcca

SEQ ID NO: 2210 - RNA, 25 nt, Artificial Sequence
  source: /note="Description of Artificial Sequence: Synthetic oligonucleotide"
acagcacugccauuggccauggcca

SEQ ID NO: 2211 - RNA, 25 nt, Artificial Sequence
  source: /note="Description of Artificial Sequence: Synthetic oligonucleotide"
aguugugcauuaaacaacuucaucc

SEQ ID NO: 2212 - RNA, 25 nt, Artificial Sequence
  source: /note="Description of Artificial Sequence: Synthetic oligonucleotide"
ccagaccguucucuccguauucccc

SEQ ID NO: 2213 - RNA, 25 nt, Artificial Sequence
  source: /note="Description of Artificial Sequence: Synthetic oligonucleotide"
gccgugguccggccagguccgaaag

SEQ ID NO: 2214 - RNA, 25 nt, Artificial Sequence
  source: /note="Description of Artificial Sequence: Synthetic oligonucleotide"
ucgcugggcacgccgugguccggcc

SEQ ID NO: 2215 - RNA, 25 nt, Artificial Sequence
  source: /note="Description of Artificial Sequence: Synthetic oligonucleotide"
cagggucgcugggcacgccgugguc

SEQ ID NO: 2216 - RNA, 25 nt, Artificial Sequence
  source: /note="Description of Artificial Sequence: Synthetic oligonucleotide"
gcccccagggucgcugggcacgccg

SEQ ID NO: 2217 - RNA, 25 nt, Artificial Sequence
  source: /note="Description of Artificial Sequence: Synthetic oligonucleotide"
aguccagcacgcccccagggucgcu

SEQ ID NO: 2218 - RNA, 25 nt, Artificial Sequence
  source: /note="Description of Artificial Sequence: Synthetic oligonucleotide"
aaguccagcacgcccccagggucgc

SEQ ID NO: 2219 - RNA, 25 nt, Artificial Sequence
  source: /note="Description of Artificial Sequence: Synthetic oligonucleotide"
cuccaggaaguccagcacgccccca

SEQ ID NO: 2220 - RNA, 25 nt, Artificial Sequence
  source: /note="Description of Artificial Sequence: Synthetic oligonucleotide"
ccuccaggaaguccagcacgccccc

SEQ ID NO: 2221 - RNA, 25 nt, Artificial Sequence
  source: /note="Description of Artificial Sequence: Synthetic oligonucleotide"
cuccugcuuauggugcaccuccucc

SEQ ID NO: 2222 - RNA, 25 nt, Artificial Sequence
  source: /note="Description of Artificial Sequence: Synthetic oligonucleotide"
ugcauccaugaugcucuccugcuua

SEQ ID NO: 2223 - RNA, 25 nt, Artificial Sequence
  source: /note="Description of Artificial Sequence: Synthetic oligonucleotide"
gcugucaccugcagugcaccacgac

SEQ ID NO: 2224 - RNA, 25 nt, Artificial Sequence
  source: /note="Description of Artificial Sequence: Synthetic oligonucleotide"
acaggcuguggccuagaggggcagc

SEQ ID NO: 2225 - RNA, 25 nt, Artificial Sequence
  source: /note="Description of Artificial Sequence: Synthetic oligonucleotide"
gacagggacaggcuguggccuagag

SEQ ID NO: 2226 - RNA, 25 nt, Artificial Sequence
  source: /note="Description of Artificial Sequence: Synthetic oligonucleotide"
agacagggacaggcuguggccuaga

SEQ ID NO: 2227 - RNA, 25 nt, Artificial Sequence
  source: /note="Description of Artificial Sequence: Synthetic oligonucleotide"
gagacagggacaggcuguggccuag

SEQ ID NO: 2228 - RNA, 25 nt, Artificial Sequence
  source: /note="Description of Artificial Sequence: Synthetic oligonucleotide"
ggcgcuaggagacagggacaggcug

SEQ ID NO: 2229 - RNA, 25 nt, Artificial Sequence
  source: /note="Description of Artificial Sequence: Synthetic oligonucleotide"
gcccugggcgcuaggagacagggac

SEQ ID NO: 2230 - RNA, 25 nt, Artificial Sequence
  source: /note="Description of Artificial Sequence: Synthetic oligonucleotide"
agcaagcccugggcgcuaggagaca

SEQ ID NO: 2231 - RNA, 25 nt, Artificial Sequence
  source: /note="Description of Artificial Sequence: Synthetic oligonucleotide"
aagcaagcccugggcgcuaggagac

SEQ ID NO: 2232 - RNA, 25 nt, Artificial Sequence
  source: /note="Description of Artificial Sequence: Synthetic oligonucleotide"
uagguaaaagcaagcccugggcgcu

SEQ ID NO: 2233 - RNA, 25 nt, Artificial Sequence
  source: /note="Description of Artificial Sequence: Synthetic oligonucleotide"
gaguggguagguaaaagcaagcccu

SEQ ID NO: 2234 - RNA, 25 nt, Artificial Sequence
  source: /note="Description of Artificial Sequence: Synthetic oligonucleotide"
ggaguggguagguaaaagcaagccc

SEQ ID NO: 2235 - RNA, 25 nt, Artificial Sequence
  source: /note="Description of Artificial Sequence: Synthetic oligonucleotide"
uacaguuaaagagcuaggagugggu

SEQ ID NO: 2236 - RNA, 25 nt, Artificial Sequence
  source: /note="Description of Artificial Sequence: Synthetic oligonucleotide"
uuccuacaguuaaagagcuaggagu

SEQ ID NO: 2237 - RNA, 25 nt, Artificial Sequence
  source: /note="Description of Artificial Sequence: Synthetic oligonucleotide"
cuuccuacaguuaaagagcuaggag

SEQ ID NO: 2238 - RNA, 25 nt, Artificial Sequence
  source: /note="Description of Artificial Sequence: Synthetic oligonucleotide"
aaauucuuccuacaguuaaagagcu

SEQ ID NO: 2239 - RNA, 25 nt, Artificial Sequence
  source: /note="Description of Artificial Sequence: Synthetic oligonucleotide"
guagggucuaggagaaauaugccuu

SEQ ID NO: 2240 - RNA, 25 nt, Artificial Sequence
  source: /note="Description of Artificial Sequence: Synthetic oligonucleotide"
uguagggucuaggagaaauaugccu

SEQ ID NO: 2241 - RNA, 25 nt, Artificial Sequence
  source: /note="Description of Artificial Sequence: Synthetic oligonucleotide"
ggccaauggcagugcuguagggucu

SEQ ID NO: 2242 - RNA, 25 nt, Artificial Sequence
  source: /note="Description of Artificial Sequence: Synthetic oligonucleotide"
ggccauggccaauggcagugcugua

SEQ ID NO: 2243 - RNA, 25 nt, Artificial Sequence
  source: /note="Description of Artificial Sequence: Synthetic oligonucleotide"
uggccauggccaauggcagugcugu

SEQ ID NO: 2244 - RNA, 25 nt, Artificial Sequence
  source: /note="Description of Artificial Sequence: Synthetic oligonucleotide"
agcauguugccauggccauggccaa

SEQ ID NO: 2245 - RNA, 25 nt, Artificial Sequence
  source: /note="Description of Artificial Sequence: Synthetic oligonucleotide"
uuaacugagcauguugccauggcca

SEQ ID NO: 2246 - RNA, 25 nt, Artificial Sequence
  source: /note="Description of Artificial Sequence: Synthetic oligonucleotide"
gcuguuuuaacugagcauguugcca

SEQ ID NO: 2247 - RNA, 25 nt, Artificial Sequence
  source: /note="Description of Artificial Sequence: Synthetic oligonucleotide"
aaguuguuuaaugcacaacuucugg

SEQ ID NO: 2248 - RNA, 25 nt, Artificial Sequence
  source: /note="Description of Artificial Sequence: Synthetic oligonucleotide"
augaaguuguuuaaugcacaacuuc

SEQ ID NO: 2249 - RNA, 25 nt, Artificial Sequence
  source: /note="Description of Artificial Sequence: Synthetic oligonucleotide"
guccuucugcccgcagugcuggaau

SEQ ID NO: 2250 - RNA, 25 nt, Artificial Sequence
  source: /note="Description of Artificial Sequence: Synthetic oligonucleotide"
uucugcccgcagugcuggaauuggc

SEQ ID NO: 2251 - RNA, 25 nt, Artificial Sequence
  source: /note="Description of Artificial Sequence: Synthetic oligonucleotide"
cccgcagugcuggaauuggccggac

SEQ ID NO: 2252 - RNA, 25 nt, Artificial Sequence
  source: /note="Description of Artificial Sequence: Synthetic oligonucleotide"
ccgcagugcuggaauuggccggaca

SEQ ID NO: 2253 - RNA, 25 nt, Artificial Sequence
  source: /note="Description of Artificial Sequence: Synthetic oligonucleotide"
uucuuauugacaucaucagagagaa

SEQ ID NO: 2254 - RNA, 25 nt, Artificial Sequence
  source: /note="Description of Artificial Sequence: Synthetic oligonucleotide"
uuauugacaucaucagagagaaagg

SEQ ID NO: 2255 - RNA, 25 nt, Artificial Sequence
  source: /note="Description of Artificial Sequence: Synthetic oligonucleotide"
uauugacaucaucagagagaaaggu

SEQ ID NO: 2256 - RNA, 25 nt, Artificial Sequence
  source: /note="Description of Artificial Sequence: Synthetic oligonucleotide"
ucaucagagagaaaggugggucauc

SEQ ID NO: 2257 - RNA, 25 nt, Artificial Sequence
  source: /note="Description of Artificial Sequence: Synthetic oligonucleotide"
ucagagagaaaggugggucaucugg

SEQ ID NO: 2258 - RNA, 25 nt, Artificial Sequence
  source: /note="Description of Artificial Sequence: Synthetic oligonucleotide"
cagagagaaaggugggucaucuggu

SEQ ID NO: 2259 - RNA, 25 nt, Artificial Sequence
  source: /note="Description of Artificial Sequence: Synthetic oligonucleotide"
ggccaauuccagcacugcgggcaga

SEQ ID NO: 2260 - RNA, 25 nt, Artificial Sequence
  source: /note="Description of Artificial Sequence: Synthetic oligonucleotide"
ccuguccggccaauuccagcacugc

SEQ ID NO: 2261 - RNA, 25 nt, Artificial Sequence
  source: /note="Description of Artificial Sequence: Synthetic oligonucleotide"
cccuguccggccaauuccagcacug

SEQ ID NO: 2262 - RNA, 25 nt, Artificial Sequence
  source: /note="Description of Artificial Sequence: Synthetic oligonucleotide"
aucaaucacaaugaacgucccuguc

SEQ ID NO: 2263 - RNA, 25 nt, Artificial Sequence
  source: /note="Description of Artificial Sequence: Synthetic oligonucleotide"
auugacguucccaaaaccauccaga

SEQ ID NO: 2264 - RNA, 25 nt, Artificial Sequence
  source: /note="Description of Artificial Sequence: Synthetic oligonucleotide"
cguucccaaaaccauccagauggug

SEQ ID NO: 2265 - RNA, 25 nt, Artificial Sequence
  source: /note="Description of Artificial Sequence: Synthetic oligonucleotide"
aaccauccagauggugcggucucag

SEQ ID NO: 2266 - RNA, 25 nt, Artificial Sequence
  source: /note="Description of Artificial Sequence: Synthetic oligonucleotide"
uccagauggugcggucucagagguc

SEQ ID NO: 2267 - RNA, 25 nt, Artificial Sequence
  source: /note="Description of Artificial Sequence: Synthetic oligonucleotide"
ccagauggugcggucucagagguca

SEQ ID NO: 2268 - RNA, 25 nt, Artificial Sequence
  source: /note="Description of Artificial Sequence: Synthetic oligonucleotide"
auggugcggucucagaggucaggga

SEQ ID NO: 2269 - RNA, 25 nt, Artificial Sequence
  source: /note="Description of Artificial Sequence: Synthetic oligonucleotide"
gaagcacaguaccgauuuaucuaua

SEQ ID NO: 2270 - RNA, 25 nt, Artificial Sequence
  source: /note="Description of Artificial Sequence: Synthetic oligonucleotide"
gcacaguaccgauuuaucuauaugg

SEQ ID NO: 2271 - RNA, 25 nt, Artificial Sequence
  source: /note="Description of Artificial Sequence: Synthetic oligonucleotide"
gcauuauauugaaacacuacagcgc

SEQ ID NO: 2272 - RNA, 25 nt, Artificial Sequence
  source: /note="Description of Artificial Sequence: Synthetic oligonucleotide"
cuacagcgcaggauugaagaagagc

SEQ ID NO: 2273 - RNA, 25 nt, Artificial Sequence
  source: /note="Description of Artificial Sequence: Synthetic oligonucleotide"
uugaagaagagcagguaccagccug

SEQ ID NO: 2274 - RNA, 25 nt, Artificial Sequence
  source: /note="Description of Artificial Sequence: Synthetic oligonucleotide"
ugaagaagagcagguaccagccuga

SEQ ID NO: 2275 - RNA, 25 nt, Artificial Sequence
  source: /note="Description of Artificial Sequence: Synthetic oligonucleotide"
gaagagcagguaccagccugagggc

SEQ ID NO: 2276 - RNA, 25 nt, Artificial Sequence
  source: /note="Description of Artificial Sequence: Synthetic oligonucleotide"
ucaauaucgcagucaacaccuacga

SEQ ID NO: 2277 - RNA, 25 nt, Artificial Sequence
  source: /note="Description of Artificial Sequence: Synthetic oligonucleotide"
gagaccgcaccaucuggaugguuuu

SEQ ID NO: 2278 - RNA, 25 nt, Artificial Sequence
  source: /note="Description of Artificial Sequence: Synthetic oligonucleotide"
ugagaccgcaccaucuggaugguuu

SEQ ID NO: 2279 - RNA, 25 nt, Artificial Sequence
  source: /note="Description of Artificial Sequence: Synthetic oligonucleotide"
gaccucugagaccgcaccaucugga

SEQ ID NO: 2280 - RNA, 25 nt, Artificial Sequence
  source: /note="Description of Artificial Sequence: Synthetic oligonucleotide"
cccugaccucugagaccgcaccauc

SEQ ID NO: 2281 - RNA, 25 nt, Artificial Sequence
  source: /note="Description of Artificial Sequence: Synthetic oligonucleotide"
gauaaaucgguacugugcuucuguc

SEQ ID NO: 2282 - RNA, 25 nt, Artificial Sequence
  source: /note="Description of Artificial Sequence: Synthetic oligonucleotide"
augcuggaccgccauauagauaaau

SEQ ID NO: 2283 - RNA, 25 nt, Artificial Sequence
  source: /note="Description of Artificial Sequence: Synthetic oligonucleotide"
gcgcuguaguguuucaauauaaugc

SEQ ID NO: 2284 - RNA, 25 nt, Artificial Sequence
  source: /note="Description of Artificial Sequence: Synthetic oligonucleotide"
cucuuccaaauuucagaaaagcaag

SEQ ID NO: 2285 - RNA, 25 nt, Artificial Sequence
  source: /note="Description of Artificial Sequence: Synthetic oligonucleotide"
ccaaauuucagaaaagcaagaggaa

SEQ ID NO: 2286 - RNA, 25 nt, Artificial Sequence
  source: /note="Description of Artificial Sequence: Synthetic oligonucleotide"
caaauuucagaaaagcaagaggaaa

SEQ ID NO: 2287 - RNA, 25 nt, Artificial Sequence
  source: /note="Description of Artificial Sequence: Synthetic oligonucleotide"
uauacaaauauuaaguauucucuag

SEQ ID NO: 2288 - RNA, 25 nt, Artificial Sequence
  source: /note="Description of Artificial Sequence: Synthetic oligonucleotide"
aguauucucuagcggaccagacgag

SEQ ID NO: 2289 - RNA, 25 nt, Artificial Sequence
  source: /note="Description of Artificial Sequence: Synthetic oligonucleotide"
cccugugcagaguaaguagugcuga

SEQ ID NO: 2290 - RNA, 25 nt, Artificial Sequence
  source: /note="Description of Artificial Sequence: Synthetic oligonucleotide"
ccuuuccucuugcuuuucugaaauu

SEQ ID NO: 2291 - RNA, 25 nt, Artificial Sequence
  source: /note="Description of Artificial Sequence: Synthetic oligonucleotide"
gagagggcucugaucuccacucguc

SEQ ID NO: 2292 - RNA, 25 nt, Artificial Sequence
  source: /note="Description of Artificial Sequence: Synthetic oligonucleotide"
uggcguuggaguacaaggcgggaga

SEQ ID NO: 2293 - RNA, 25 nt, Artificial Sequence
  source: /note="Description of Artificial Sequence: Synthetic oligonucleotide"
guggcguuggaguacaaggcgggag

SEQ ID NO: 2294 - RNA, 25 nt, Artificial Sequence
  source: /note="Description of Artificial Sequence: Synthetic oligonucleotide"
acaggguggcguuggaguacaaggc

SEQ ID NO: 2295 - RNA, 25 nt, Artificial Sequence
  source: /note="Description of Artificial Sequence: Synthetic oligonucleotide"
cacaggguggcguuggaguacaagg

SEQ ID NO: 2296 - RNA, 25 nt, Artificial Sequence
  source: /note="Description of Artificial Sequence: Synthetic oligonucleotide"
cugcacaggguggcguuggaguaca

SEQ ID NO: 2297 - RNA, 25 nt, Artificial Sequence
  source: /note="Description of Artificial Sequence: Synthetic oligonucleotide"
cuacuuacucugcacaggguggcgu

SEQ ID NO: 2298 - RNA, 25 nt, Artificial Sequence
  source: /note="Description of Artificial Sequence: Synthetic oligonucleotide"
ucagcacuacuuacucugcacaggg

SEQ ID NO: 2299 - RNA, 25 nt, Artificial Sequence
  source: /note="Description of Artificial Sequence: Synthetic oligonucleotide"
ccuucagcacuacuuacucugcaca

SEQ ID NO: 2300 - RNA, 25 nt, Artificial Sequence
  source: /note="Description of Artificial Sequence: Synthetic oligonucleotide"
uccuucagcacuacuuacucugcac

SEQ ID NO: 2301 - RNA, 25 nt, Artificial Sequence
  source: /note="Description of Artificial Sequence: Synthetic oligonucleotide"
gacagugcuagagucuaugaaaacg

SEQ ID NO: 2302 - RNA, 25 nt, Artificial Sequence
  source: /note="Description of Artificial Sequence: Synthetic oligonucleotide"
acagugcuagagucuaugaaaacgu

SEQ ID NO: 2303 - RNA, 25 nt, Artificial Sequence
  source: /note="Description of Artificial Sequence: Synthetic oligonucleotide"
ccugccaaaacuucagcacagaaau

SEQ ID NO: 2304 - RNA, 25 nt, Artificial Sequence
  source: /note="Description of Artificial Sequence: Synthetic oligonucleotide"
acucuagcacugucuucucucauuc

SEQ ID NO: 2305 - RNA, 25 nt, Artificial Sequence
  source: /note="Description of Artificial Sequence: Synthetic oligonucleotide"
ucugaaacuuuucugcuguugcauc

SEQ ID NO: 2306 - RNA, 25 nt, Artificial Sequence
  source: /note="Description of Artificial Sequence: Synthetic oligonucleotide"
ccuauuucugugcugaaguuuuggc

SEQ ID NO: 2307 - RNA, 25 nt, Artificial Sequence
  source: /note="Description of Artificial Sequence: Synthetic oligonucleotide"
aauaccuauuucugugcugaaguuu

SEQ ID NO: 2308 - RNA, 25 nt, Artificial Sequence
  source: /note="Description of Artificial Sequence: Synthetic oligonucleotide"
agaaaguuuaugugaagacagaauu

SEQ ID NO: 2309 - RNA, 25 nt, Artificial Sequence
  source: /note="Description of Artificial Sequence: Synthetic oligonucleotide"
uuuaugugaagacagaauuuggauu

SEQ ID NO: 2310 - RNA, 25 nt, Artificial Sequence
  source: /note="Description of Artificial Sequence: Synthetic oligonucleotide"
ugugaagacagaauuuggauuugga

SEQ ID NO: 2311 - RNA, 25 nt, Artificial Sequence
  source: /note="Description of Artificial Sequence: Synthetic oligonucleotide"
auuuggauuuggaaggcuugcaaug

SEQ ID NO: 2312 - RNA, 25 nt, Artificial Sequence
  source: /note="Description of Artificial Sequence: Synthetic oligonucleotide"
auuuuauagaauuuguuugaaauug

SEQ ID NO: 2313 - RNA, 25 nt, Artificial Sequence
  source: /note="Description of Artificial Sequence: Synthetic oligonucleotide"
auugugcgcuguauuuugcagauua

SEQ ID NO: 2314 - RNA, 25 nt, Artificial Sequence
  source: /note="Description of Artificial Sequence: Synthetic oligonucleotide"
uugugcgcuguauuuugcagauuau

SEQ ID NO: 2315 - RNA, 25 nt, Artificial Sequence
  source: /note="Description of Artificial Sequence: Synthetic oligonucleotide"
ugugcgcuguauuuugcagauuaug

SEQ ID NO: 2316 - RNA, 25 nt, Artificial Sequence
  source: /note="Description of Artificial Sequence: Synthetic oligonucleotide"
uuauggggauucaaauucuaguaau

SEQ ID NO: 2317 - RNA, 25 nt, Artificial Sequence
  source: /note="Description of Artificial Sequence: Synthetic oligonucleotide"
guuuaauuuuuuuuuuccucauugu

SEQ ID NO: 2318 - RNA, 25 nt, Artificial Sequence
  source: /note="Description of Artificial Sequence: Synthetic oligonucleotide"
uuuaauuuuuuuuuuccucauuguu

SEQ ID NO: 2319 - RNA, 25 nt, Artificial Sequence
  source: /note="Description of Artificial Sequence: Synthetic oligonucleotide"
uuaauuuuuuuuuuccucauuguug

SEQ ID NO: 2320 - RNA, 25 nt, Artificial Sequence
  source: /note="Description of Artificial Sequence: Synthetic oligonucleotide"
uuggggaugaugagaagaaaugauu

SEQ ID NO: 2321 - RNA, 25 nt, Artificial Sequence
  source: /note="Description of Artificial Sequence: Synthetic oligonucleotide"
uggggaugaugagaagaaaugauuu

SEQ ID NO: 2322 - RNA, 25 nt, Artificial Sequence
  source: /note="Description of Artificial Sequence: Synthetic oligonucleotide"
ucauuuaccaucauguauccaguag

SEQ ID NO: 2323 - RNA, 25 nt, Artificial Sequence
  source: /note="Description of Artificial Sequence: Synthetic oligonucleotide"
uccaguaguggauaauucauuuuga

SEQ ID NO: 2324 - RNA, 25 nt, Artificial Sequence
  source: /note="Description of Artificial Sequence: Synthetic oligonucleotide"
aauucauuuugauggcuucuauuuu

SEQ ID NO: 2325 - RNA, 25 nt, Artificial Sequence
  source: /note="Description of Artificial Sequence: Synthetic oligonucleotide"
gacugucagaaguugaccuuugcac

SEQ ID NO: 2326 - RNA, 25 nt, Artificial Sequence
  source: /note="Description of Artificial Sequence: Synthetic oligonucleotide"
uuaaagagucauagaaaaagaauca

SEQ ID NO: 2327 - RNA, 25 nt, Artificial Sequence
  source: /note="Description of Artificial Sequence: Synthetic oligonucleotide"
aagaaucauggauauuuaugaauua

SEQ ID NO: 2328 - RNA, 25 nt, Artificial Sequence
  source: /note="Description of Artificial Sequence: Synthetic oligonucleotide"
auggauauuuaugaauuaagguaag

SEQ ID NO: 2329 - RNA, 25 nt, Artificial Sequence
  source: /note="Description of Artificial Sequence: Synthetic oligonucleotide"
uauuuaugaauuaagguaagaggug

SEQ ID NO: 2330 - RNA, 25 nt, Artificial Sequence
  source: /note="Description of Artificial Sequence: Synthetic oligonucleotide"
uuccagccguugaccaauuauaguu

SEQ ID NO: 2331 - RNA, 25 nt, Artificial Sequence
  source: /note="Description of Artificial Sequence: Synthetic oligonucleotide"
guucggcuguugacugagaaguuug

SEQ ID NO: 2332 - RNA, 25 nt, Artificial Sequence
  source: /note="Description of Artificial Sequence: Synthetic oligonucleotide"
cggcuguugacugagaaguuugugg

SEQ ID NO: 2333 - RNA, 25 nt, Artificial Sequence
  source: /note="Description of Artificial Sequence: Synthetic oligonucleotide"
ggcuguugacugagaaguuuguggu

SEQ ID NO: 2334 - RNA, 25 nt, Artificial Sequence
  source: /note="Description of Artificial Sequence: Synthetic oligonucleotide"
aauaauugucuuguacuuagaaaaa

SEQ ID NO: 2335 - RNA, 25 nt, Artificial Sequence
  source: /note="Description of Artificial Sequence: Synthetic oligonucleotide"
ggcgucuaugaaugaccaguguuuu

SEQ ID NO: 2336 - RNA, 25 nt, Artificial Sequence
  source: /note="Description of Artificial Sequence: Synthetic oligonucleotide"
ugacaaacuuaucccaaaacuuuag

SEQ ID NO: 2337 - RNA, 25 nt, Artificial Sequence
  source: /note="Description of Artificial Sequence: Synthetic oligonucleotide"
cccccaacuguuagucaaucugagc

SEQ ID NO: 2338 - RNA, 25 nt, Artificial Sequence
  source: /note="Description of Artificial Sequence: Synthetic oligonucleotide"
ccccaacuguuagucaaucugagcu

SEQ ID NO: 2339 - RNA, 25 nt, Artificial Sequence
  source: /note="Description of Artificial Sequence: Synthetic oligonucleotide"
uuagucaaucugagcugggcucagc

SEQ ID NO: 2340 - RNA, 25 nt, Artificial Sequence
  source: /note="Description of Artificial Sequence: Synthetic oligonucleotide"
uagucaaucugagcugggcucagcu

SEQ ID NO: 2341 - RNA, 25 nt, Artificial Sequence
  source: /note="Description of Artificial Sequence: Synthetic oligonucleotide"
cugggcuguucuucugccagccugc

SEQ ID NO: 2342 - RNA, 25 nt, Artificial Sequence
  source: /note="Description of Artificial Sequence: Synthetic oligonucleotide"
ggcuguucuucugccagccugcagg

SEQ ID NO: 2343 - RNA, 25 nt, Artificial Sequence
  source: /note="Description of Artificial Sequence: Synthetic oligonucleotide"
gccagccugcagguggccacucaug

SEQ ID NO: 2344 - RNA, 25 nt, Artificial Sequence
  source: /note="Description of Artificial Sequence: Synthetic oligonucleotide"
gcagguggccacucauguggucagc

SEQ ID NO: 2345 - RNA, 25 nt, Artificial Sequence
  source: /note="Description of Artificial Sequence: Synthetic oligonucleotide"
guggccacucauguggucagcaggu

SEQ ID NO: 2346 - RNA, 25 nt, Artificial Sequence
  source: /note="Description of Artificial Sequence: Synthetic oligonucleotide"
gccacucauguggucagcaggucgg

SEQ ID NO: 2347 - RNA, 25 nt, Artificial Sequence
  source: /note="Description of Artificial Sequence: Synthetic oligonucleotide"
guggucagcaggucggcggagagac

SEQ ID NO: 2348 - RNA, 25 nt, Artificial Sequence
  source: /note="Description of Artificial Sequence: Synthetic oligonucleotide"
uggucagcaggucggcggagagacu

SEQ ID NO: 2349 - RNA, 25 nt, Artificial Sequence
  source: /note="Description of Artificial Sequence: Synthetic oligonucleotide"
cagcaggucggcggagagacuggga

SEQ ID NO: 2350 - RNA, 25 nt, Artificial Sequence
  source: /note="Description of Artificial Sequence: Synthetic oligonucleotide"
aggucggcggagagacugggauggc

SEQ ID NO: 2351 - RNA, 25 nt, Artificial Sequence
  source: /note="Description of Artificial Sequence: Synthetic oligonucleotide"
ggucggcggagagacugggauggcu

SEQ ID NO: 2352 - RNA, 25 nt, Artificial Sequence
  source: /note="Description of Artificial Sequence: Synthetic oligonucleotide"
uccuucuucguguagucucuuucag

SEQ ID NO: 2353 - RNA, 25 nt, Artificial Sequence
  source: /note="Description of Artificial Sequence: Synthetic oligonucleotide"
cuucguguagucucuuucaguggcc

SEQ ID NO: 2354 - RNA, 25 nt, Artificial Sequence
  source: /note="Description of Artificial Sequence: Synthetic oligonucleotide"
guguagucucuuucaguggccuggc

SEQ ID NO: 2355 - RNA, 25 nt, Artificial Sequence
  source: /note="Description of Artificial Sequence: Synthetic oligonucleotide"
agucucuuucaguggccuggcuggc

SEQ ID NO: 2356 - RNA, 25 nt, Artificial Sequence
  source: /note="Description of Artificial Sequence: Synthetic oligonucleotide"
gucucuuucaguggccuggcuggca

SEQ ID NO: 2357 - RNA, 25 nt, Artificial Sequence
  source: /note="Description of Artificial Sequence: Synthetic oligonucleotide"
gcucccaagagcucaaaagcagaaa

SEQ ID NO: 2358 - RNA, 25 nt, Artificial Sequence
  source: /note="Description of Artificial Sequence: Synthetic oligonucleotide"
caagagcucaaaagcagaaauggcc

SEQ ID NO: 2359 - RNA, 25 nt, Artificial Sequence
  source: /note="Description of Artificial Sequence: Synthetic oligonucleotide"
augaugaugaugaugaugaugauga

SEQ ID NO: 2360 - RNA, 25 nt, Artificial Sequence
  source: /note="Description of Artificial Sequence: Synthetic oligonucleotide"
ugguuuuuucuaaucagaagaaagc

SEQ ID NO: 2361 - RNA, 25 nt, Artificial Sequence
  source: /note="Description of Artificial Sequence: Synthetic oligonucleotide"
gguuuuuucuaaucagaagaaagcu

SEQ ID NO: 2362 - RNA, 25 nt, Artificial Sequence
  source: /note="Description of Artificial Sequence: Synthetic oligonucleotide"
guuuuuucuaaucagaagaaagcug

SEQ ID NO: 2363 - RNA, 25 nt, Artificial Sequence
  source: /note="Description of Artificial Sequence: Synthetic oligonucleotide"
acaagcccagcucagauucaagaaa

SEQ ID NO: 2364 - RNA, 25 nt, Artificial Sequence
  source: /note="Description of Artificial Sequence: Synthetic oligonucleotide"
caagcccagcucagauucaagaaaa

SEQ ID NO: 2365 - RNA, 25 nt, Artificial Sequence
  source: /note="Description of Artificial Sequence: Synthetic oligonucleotide"
gauucaagaaaagggugugaaguag

SEQ ID NO: 2366 - RNA, 25 nt, Artificial Sequence
  source: /note="Description of Artificial Sequence: Synthetic oligonucleotide"
ggugugaaguagaggugcaguuaag

SEQ ID NO: 2367 - RNA, 25 nt, Artificial Sequence
  source: /note="Description of Artificial Sequence: Synthetic oligonucleotide"
gugugaaguagaggugcaguuaagu

SEQ ID NO: 2368 - RNA, 25 nt, Artificial Sequence
  source: /note="Description of Artificial Sequence: Synthetic oligonucleotide"
ugugaaguagaggugcaguuaagug

SEQ ID NO: 2369 - RNA, 25 nt, Artificial Sequence
  source: /note="Description of Artificial Sequence: Synthetic oligonucleotide"
gugaaguagaggugcaguuaagugg

SEQ ID NO: 2370 - RNA, 25 nt, Artificial Sequence
  source: /note="Description of Artificial Sequence: Synthetic oligonucleotide"
ugaaguagaggugcaguuaaguggg

SEQ ID NO: 2371 - RNA, 25 nt, Artificial Sequence
  source: /note="Description of Artificial Sequence: Synthetic oligonucleotide"
aguggggggccacuagucuaacaga

SEQ ID NO: 2372 - RNA, 25 nt, Artificial Sequence
  source: /note="Description of Artificial Sequence: Synthetic oligonucleotide"
uaacagacggucacaaccagugcca

SEQ ID NO: 2373 - RNA, 25 nt, Artificial Sequence
  source: /note="Description of Artificial Sequence: Synthetic oligonucleotide"
ucacaaccagugccauggaaaacca

SEQ ID NO: 2374 - RNA, 25 nt, Artificial Sequence
  source: /note="Description of Artificial Sequence: Synthetic oligonucleotide"
caaaagcagaaguugcuagugaccu

SEQ ID NO: 2375 - RNA, 25 nt, Artificial Sequence
  source: /note="Description of Artificial Sequence: Synthetic oligonucleotide"
aaaagcagaaguugcuagugaccuu

SEQ ID NO: 2376 - RNA, 25 nt, Artificial Sequence
  source: /note="Description of Artificial Sequence: Synthetic oligonucleotide"
ggaagccgaagcugcuuacaguagc

SEQ ID NO: 2377 - RNA, 25 nt, Artificial Sequence
  source: /note="Description of Artificial Sequence: Synthetic oligonucleotide"
gaagccgaagcugcuuacaguagcu

SEQ ID NO: 2378 - RNA, 25 nt, Artificial Sequence
  source: /note="Description of Artificial Sequence: Synthetic oligonucleotide"
gaaagucagacuaagaaauaaagag

SEQ ID NO: 2379 - RNA, 25 nt, Artificial Sequence
  source: /note="Description of Artificial Sequence: Synthetic oligonucleotide"
aaagucagacuaagaaauaaagaga

SEQ ID NO: 2380 - RNA, 25 nt, Artificial Sequence
  source: /note="Description of Artificial Sequence: Synthetic oligonucleotide"
uuucugcuagcccugagccuauuuu

SEQ ID NO: 2381 - RNA, 25 nt, Artificial Sequence
  source: /note="Description of Artificial Sequence: Synthetic oligonucleotide"
ugagccuauuuuuggaaccagcacu

SEQ ID NO: 2382 - RNA, 25 nt, Artificial Sequence
  source: /note="Description of Artificial Sequence: Synthetic oligonucleotide"
gagccuauuuuuggaaccagcacuu

SEQ ID NO: 2383 - RNA, 25 nt, Artificial Sequence
  source: /note="Description of Artificial Sequence: Synthetic oligonucleotide"
agccuauuuuuggaaccagcacuug

SEQ ID NO: 2384 - RNA, 25 nt, Artificial Sequence
  source: /note="Description of Artificial Sequence: Synthetic oligonucleotide"
agcacuuggggaaacugaucuugug

SEQ ID NO: 2385 - RNA, 25 nt, Artificial Sequence
  source: /note="Description of Artificial Sequence: Synthetic oligonucleotide"
cuuggggaaacugaucuugugagga

SEQ ID NO: 2386 - RNA, 25 nt, Artificial Sequence
  source: /note="Description of Artificial Sequence: Synthetic oligonucleotide"
ugaucuugugaggauggauguguuu

SEQ ID NO: 2387 - RNA, 25 nt, Artificial Sequence
  source: /note="Description of Artificial Sequence: Synthetic oligonucleotide"
gaucuugugaggauggauguguuua

SEQ ID NO: 2388 - RNA, 25 nt, Artificial Sequence
  source: /note="Description of Artificial Sequence: Synthetic oligonucleotide"
ugaggauggauguguuuagggacac

SEQ ID NO: 2389 - RNA, 25 nt, Artificial Sequence
  source: /note="Description of Artificial Sequence: Synthetic oligonucleotide"
gaggauggauguguuuagggacaca

SEQ ID NO: 2390 - RNA, 25 nt, Artificial Sequence
  source: /note="Description of Artificial Sequence: Synthetic oligonucleotide"
gcuuuugagagcagcaccaccccac

SEQ ID NO: 2391 - RNA, 25 nt, Artificial Sequence
  source: /note="Description of Artificial Sequence: Synthetic oligonucleotide"
cuuuugagagcagcaccaccccacu

SEQ ID NO: 2392 - RNA, 25 nt, Artificial Sequence
  source: /note="Description of Artificial Sequence: Synthetic oligonucleotide"
uuuugagagcagcaccaccccacug

SEQ ID NO: 2393 - RNA, 25 nt, Artificial Sequence
  source: /note="Description of Artificial Sequence: Synthetic oligonucleotide"
caccccacuggggcauccccagacu

SEQ ID NO: 2394 - RNA, 25 nt, Artificial Sequence
  source: /note="Description of Artificial Sequence: Synthetic oligonucleotide"
accccacuggggcauccccagacuu

SEQ ID NO: 2395 - RNA, 25 nt, Artificial Sequence
  source: /note="Description of Artificial Sequence: Synthetic oligonucleotide"
aaacgugacucuuucuuaaugccac

SEQ ID NO: 2396 - RNA, 25 nt, Artificial Sequence
  source: /note="Description of Artificial Sequence: Synthetic oligonucleotide"
aacgugacucuuucuuaaugccacu

SEQ ID NO: 2397 - RNA, 25 nt, Artificial Sequence
  source: /note="Description of Artificial Sequence: Synthetic oligonucleotide"
uucuuaaugccacuggguuuuaguc

SEQ ID NO: 2398 - RNA, 25 nt, Artificial Sequence
  source: /note="Description of Artificial Sequence: Synthetic oligonucleotide"
ggguuuuagucaggccacagugaga

SEQ ID NO: 2399 - RNA, 25 nt, Artificial Sequence
  source: /note="Description of Artificial Sequence: Synthetic oligonucleotide"
cacagugagaaggaacagcccuaac

SEQ ID NO: 2400 - RNA, 25 nt, Artificial Sequence
  source: /note="Description of Artificial Sequence: Synthetic oligonucleotide"
gaacagcccuaacaggccuccagcc

SEQ ID NO: 2401 - RNA, 25 nt, Artificial Sequence
  source: /note="Description of Artificial Sequence: Synthetic oligonucleotide"
gccucauauguugaaucauccagug

SEQ ID NO: 2402 - RNA, 25 nt, Artificial Sequence
  source: /note="Description of Artificial Sequence: Synthetic oligonucleotide"
gcggauauuucaaugaaaauaucau

SEQ ID NO: 2403 - RNA, 25 nt, Artificial Sequence
  source: /note="Description of Artificial Sequence: Synthetic oligonucleotide"
aaauaucauugguugacuuuuguga

SEQ ID NO: 2404 - RNA, 25 nt, Artificial Sequence
  source: /note="Description of Artificial Sequence: Synthetic oligonucleotide"
gacuuuugugaugguaauaaugcua

SEQ ID NO: 2405 - RNA, 25 nt, Artificial Sequence
  source: /note="Description of Artificial Sequence: Synthetic oligonucleotide"
cuauggcaucuuugccaugaaguug

SEQ ID NO: 2406 - RNA, 25 nt, Artificial Sequence
  source: /note="Description of Artificial Sequence: Synthetic oligonucleotide"
cuuugccaugaaguuguggccuccu

SEQ ID NO: 2407 - RNA, 25 nt, Artificial Sequence
  source: /note="Description of Artificial Sequence: Synthetic oligonucleotide"
uggccuccuuggauucuucugacuu

SEQ ID NO: 2408 - RNA, 25 nt, Artificial Sequence
  source: /note="Description of Artificial Sequence: Synthetic oligonucleotide"
gauucuucugacuuuggcuucugaa

SEQ ID NO: 2409 - RNA, 25 nt, Artificial Sequence
  source: /note="Description of Artificial Sequence: Synthetic oligonucleotide"
cuucugacuuuggcuucugaaagga

SEQ ID NO: 2410 - RNA, 25 nt, Artificial Sequence
  source: /note="Description of Artificial Sequence: Synthetic oligonucleotide"
ugaaaggaaggccuagauccagccc

SEQ ID NO: 2411 - RNA, 25 nt, Artificial Sequence
  source: /note="Description of Artificial Sequence: Synthetic oligonucleotide"
aaggaaggccuagauccagcccugg

SEQ ID NO: 2412 - RNA, 25 nt, Artificial Sequence
  source: /note="Description of Artificial Sequence: Synthetic oligonucleotide"
cagcccuggugguaguuccuuucug

SEQ ID NO: 2413 - RNA, 25 nt, Artificial Sequence
  source: /note="Description of Artificial Sequence: Synthetic oligonucleotide"
gaggucucucagucccuugagacuu

SEQ ID NO: 2414 - RNA, 25 nt, Artificial Sequence
  source: /note="Description of Artificial Sequence: Synthetic oligonucleotide"
aggucucucagucccuugagacuuu

SEQ ID NO: 2415 - RNA, 25 nt, Artificial Sequence
  source: /note="Description of Artificial Sequence: Synthetic oligonucleotide"
ggucucucagucccuugagacuuug

SEQ ID NO: 2416 - RNA, 25 nt, Artificial Sequence
  source: /note="Description of Artificial Sequence: Synthetic oligonucleotide"
agucccuugagacuuugggguaguu

SEQ ID NO: 2417 - RNA, 25 nt, Artificial Sequence
  source: /note="Description of Artificial Sequence: Synthetic oligonucleotide"
ugaacuuugaauugcuucagaacac

SEQ ID NO: 2418 - RNA, 25 nt, Artificial Sequence
  source: /note="Description of Artificial Sequence: Synthetic oligonucleotide"
uuugaauugcuucagaacacaggug

SEQ ID NO: 2419 - RNA, 25 nt, Artificial Sequence
  source: /note="Description of Artificial Sequence: Synthetic oligonucleotide"
gcuucagaacacagguguggccuga

SEQ ID NO: 2420 - RNA, 25 nt, Artificial Sequence
  source: /note="Description of Artificial Sequence: Synthetic oligonucleotide"
uguggccugaagguauucccuuauu

SEQ ID NO: 2421 - RNA, 25 nt, Artificial Sequence
  source: /note="Description of Artificial Sequence: Synthetic oligonucleotide"
guggccugaagguauucccuuauua

SEQ ID NO: 2422 - RNA, 25 nt, Artificial Sequence
  source: /note="Description of Artificial Sequence: Synthetic oligonucleotide"
caucgacucauucuccauuuugcuu

SEQ ID NO: 2423 - RNA, 25 nt, Artificial Sequence
  source: /note="Description of Artificial Sequence: Synthetic oligonucleotide"
guuuugucuugacuugacuugacuu

SEQ ID NO: 2424 - RNA, 25 nt, Artificial Sequence
  source: /note="Description of Artificial Sequence: Synthetic oligonucleotide"
uuuugucuugacuugacuugacuuu

SEQ ID NO: 2425 - RNA, 25 nt, Artificial Sequence
  source: /note="Description of Artificial Sequence: Synthetic oligonucleotide"
uuugucuugacuugacuugacuuug

SEQ ID NO: 2426 - RNA, 25 nt, Artificial Sequence
  source: /note="Description of Artificial Sequence: Synthetic oligonucleotide"
uugucuugacuugacuugacuuugg

SEQ ID NO: 2427 - RNA, 25 nt, Artificial Sequence
  source: /note="Description of Artificial Sequence: Synthetic oligonucleotide"
agaucaguugcuuuuauacucagaa

SEQ ID NO: 2428 - RNA, 25 nt, Artificial Sequence
  source: /note="Description of Artificial Sequence: Synthetic oligonucleotide"
uacucagaauggaaauaccugaucu

SEQ ID NO: 2429 - RNA, 25 nt, Artificial Sequence
  source: /note="Description of Artificial Sequence: Synthetic oligonucleotide"
gauuucauuuagauuucccuccacg

SEQ ID NO: 2430 - RNA, 25 nt, Artificial Sequence
  source: /note="Description of Artificial Sequence: Synthetic oligonucleotide"
aacuaucauguucuuauguaaacuu

SEQ ID NO: 2431 - RNA, 25 nt, Artificial Sequence
  source: /note="Description of Artificial Sequence: Synthetic oligonucleotide"
cauguucuuauguaaacuuaggcca

SEQ ID NO: 2432 - RNA, 25 nt, Artificial Sequence
  source: /note="Description of Artificial Sequence: Synthetic oligonucleotide"
caaggccagaguuaucauagucccu

SEQ ID NO: 2433 - RNA, 25 nt, Artificial Sequence
  source: /note="Description of Artificial Sequence: Synthetic oligonucleotide"
aguuaucauagucccuagguugcua

SEQ ID NO: 2434 - RNA, 25 nt, Artificial Sequence
  source: /note="Description of Artificial Sequence: Synthetic oligonucleotide"
agguugcuacggcuuaucaugugcu

SEQ ID NO: 2435 - RNA, 25 nt, Artificial Sequence
  source: /note="Description of Artificial Sequence: Synthetic oligonucleotide"
uacggcuuaucaugugcuugguaaa

SEQ ID NO: 2436 - RNA, 25 nt, Artificial Sequence
  source: /note="Description of Artificial Sequence: Synthetic oligonucleotide"
caugugcuugguaaaaggugaucgc

SEQ ID NO: 2437 - RNA, 25 nt, Artificial Sequence
  source: /note="Description of Artificial Sequence: Synthetic oligonucleotide"
ucagacgaguuuacuuuacaugaga

SEQ ID NO: 2438 - RNA, 25 nt, Artificial Sequence
  source: /note="Description of Artificial Sequence: Synthetic oligonucleotide"
aguuuacuuuacaugagauggaauc

SEQ ID NO: 2439 - RNA, 25 nt, Artificial Sequence
  source: /note="Description of Artificial Sequence: Synthetic oligonucleotide"
uuacaugagauggaaucaggcagag

SEQ ID NO: 2440 - RNA, 25 nt, Artificial Sequence
  source: /note="Description of Artificial Sequence: Synthetic oligonucleotide"
augagauggaaucaggcagagaggc

SEQ ID NO: 2441 - RNA, 25 nt, Artificial Sequence
  source: /note="Description of Artificial Sequence: Synthetic oligonucleotide"
ugagauggaaucaggcagagaggcu

SEQ ID NO: 2442 - RNA, 25 nt, Artificial Sequence
  source: /note="Description of Artificial Sequence: Synthetic oligonucleotide"
gaaucaggcagagaggcugggauga

SEQ ID NO: 2443 - RNA, 25 nt, Artificial Sequence
  source: /note="Description of Artificial Sequence: Synthetic oligonucleotide"
aggcugggaugauggagaaagcucg

SEQ ID NO: 2444 - RNA, 25 nt, Artificial Sequence
  source: /note="Description of Artificial Sequence: Synthetic oligonucleotide"
aggugaaguuuuaaaaaaaaaguug

SEQ ID NO: 2445 - RNA, 25 nt, Artificial Sequence
  source: /note="Description of Artificial Sequence: Synthetic oligonucleotide"
aaguuuuaaaaaaaaaguuguggaa

SEQ ID NO: 2446 - RNA, 25 nt, Artificial Sequence
  source: /note="Description of Artificial Sequence: Synthetic oligonucleotide"
aguuguggaaaggaaaguuccaaag

SEQ ID NO: 2447 - RNA, 25 nt, Artificial Sequence
  source: /note="Description of Artificial Sequence: Synthetic oligonucleotide"
uguggaaaggaaaguuccaaagagg

SEQ ID NO: 2448 - RNA, 25 nt, Artificial Sequence
  source: /note="Description of Artificial Sequence: Synthetic oligonucleotide"
gaaaguuccaaagaggugguuucug

SEQ ID NO: 2449 - RNA, 25 nt, Artificial Sequence
  source: /note="Description of Artificial Sequence: Synthetic oligonucleotide"
gguuucugaggaagucagagcgccc

SEQ ID NO: 2450 - RNA, 25 nt, Artificial Sequence
  source: /note="Description of Artificial Sequence: Synthetic oligonucleotide"
guuucugaggaagucagagcgccca

SEQ ID NO: 2451 - RNA, 25 nt, Artificial Sequence
  source: /note="Description of Artificial Sequence: Synthetic oligonucleotide"
cgcccagggccagagcagucaguaa

SEQ ID NO: 2452 - RNA, 25 nt, Artificial Sequence
  source: /note="Description of Artificial Sequence: Synthetic oligonucleotide"
gcccagggccagagcagucaguaau

SEQ ID NO: 2453 - RNA, 25 nt, Artificial Sequence
  source: /note="Description of Artificial Sequence: Synthetic oligonucleotide"
cagagcagucaguaaugggugaaug

SEQ ID NO: 2454 - RNA, 25 nt, Artificial Sequence
  source: /note="Description of Artificial Sequence: Synthetic oligonucleotide"
ucaguaaugggugaaugagguuguu

SEQ ID NO: 2455 - RNA, 25 nt, Artificial Sequence
  source: /note="Description of Artificial Sequence: Synthetic oligonucleotide"
gggugaaugagguuguuuggaaagu

SEQ ID NO: 2456 - RNA, 25 nt, Artificial Sequence
  source: /note="Description of Artificial Sequence: Synthetic oligonucleotide"
uuggaaagucggugugacagacaca

SEQ ID NO: 2457 - RNA, 25 nt, Artificial Sequence
  source: /note="Description of Artificial Sequence: Synthetic oligonucleotide"
agacacauggaugccaucuacuucu

SEQ ID NO: 2458 - RNA, 25 nt, Artificial Sequence
  source: /note="Description of Artificial Sequence: Synthetic oligonucleotide"
uggaugccaucuacuucuagguugc

SEQ ID NO: 2459 - RNA, 25 nt, Artificial Sequence
  source: /note="Description of Artificial Sequence: Synthetic oligonucleotide"
augccaucuacuucuagguugcugg

SEQ ID NO: 2460 - RNA, 25 nt, Artificial Sequence
  source: /note="Description of Artificial Sequence: Synthetic oligonucleotide"
ugccaucuacuucuagguugcuggu

SEQ ID NO: 2461 - RNA, 25 nt, Artificial Sequence
  source: /note="Description of Artificial Sequence: Synthetic oligonucleotide"
augcacaauauuccauagcucacug

SEQ ID NO: 2462 - RNA, 25 nt, Artificial Sequence
  source: /note="Description of Artificial Sequence: Synthetic oligonucleotide"
cugaggauuuuaaaauuauaagcau

SEQ ID NO: 2463 - RNA, 25 nt, Artificial Sequence
  source: /note="Description of Artificial Sequence: Synthetic oligonucleotide"
auuauaagcauaggauuuuauauuu

SEQ ID NO: 2464 - RNA, 25 nt, Artificial Sequence
  source: /note="Description of Artificial Sequence: Synthetic oligonucleotide"
uuauaagcauaggauuuuauauuuu

SEQ ID NO: 2465 - RNA, 25 nt, Artificial Sequence
  source: /note="Description of Artificial Sequence: Synthetic oligonucleotide"
uauaagcauaggauuuuauauuuug

SEQ ID NO: 2466 - RNA, 25 nt, Artificial Sequence
  source: /note="Description of Artificial Sequence: Synthetic oligonucleotide"
uauauuuuggggugaaagaauuauc

SEQ ID NO: 2467 - RNA, 25 nt, Artificial Sequence
  source: /note="Description of Artificial Sequence: Synthetic oligonucleotide"
gggugaaagaauuaucuggcacauu

SEQ ID NO: 2468 - RNA, 25 nt, Artificial Sequence
  source: /note="Description of Artificial Sequence: Synthetic oligonucleotide"
aagaauuaucuggcacauuagguau

SEQ ID NO: 2469 - RNA, 25 nt, Artificial Sequence
  source: /note="Description of Artificial Sequence: Synthetic oligonucleotide"
auaacuuuuuuuaaaaaaaacuaaa

SEQ ID NO: 2470 - RNA, 25 nt, Artificial Sequence
  source: /note="Description of Artificial Sequence: Synthetic oligonucleotide"
uaaaaggcgcuucauguccagugug

SEQ ID NO: 2471 - RNA, 25 nt, Artificial Sequence
  source: /note="Description of Artificial Sequence: Synthetic oligonucleotide"
caguguguggcccuucugaaacuua

SEQ ID NO: 2472 - RNA, 25 nt, Artificial Sequence
  source: /note="Description of Artificial Sequence: Synthetic oligonucleotide"
auggucaucucucccacugaaacca

SEQ ID NO: 2473 - RNA, 25 nt, Artificial Sequence
  source: /note="Description of Artificial Sequence: Synthetic oligonucleotide"
acugaaaccaaggucuuuucaaaug

SEQ ID NO: 2474 - RNA, 25 nt, Artificial Sequence
  source: /note="Description of Artificial Sequence: Synthetic oligonucleotide"
caaggucuuuucaaauguggcuaaa

SEQ ID NO: 2475 - RNA, 25 nt, Artificial Sequence
  source: /note="Description of Artificial Sequence: Synthetic oligonucleotide"
aaggucuuuucaaauguggcuaaau

SEQ ID NO: 2476 - RNA, 25 nt, Artificial Sequence
  source: /note="Description of Artificial Sequence: Synthetic oligonucleotide"
aggucuuuucaaauguggcuaaaug

SEQ ID NO: 2477 - RNA, 25 nt, Artificial Sequence
  source: /note="Description of Artificial Sequence: Synthetic oligonucleotide"
uuucaaauguggcuaaauggggaug

SEQ ID NO: 2478 - RNA, 25 nt, Artificial Sequence
  source: /note="Description of Artificial Sequence: Synthetic oligonucleotide"
guggcuaaauggggaugaggagaca

SEQ ID NO: 2479 - RNA, 25 nt, Artificial Sequence
  source: /note="Description of Artificial Sequence: Synthetic oligonucleotide"
uggcuaaauggggaugaggagacac

SEQ ID NO: 2480 - RNA, 25 nt, Artificial Sequence
  source: /note="Description of Artificial Sequence: Synthetic oligonucleotide"
uaaauggggaugaggagacacgggu

SEQ ID NO: 2481 - RNA, 25 nt, Artificial Sequence
  source: /note="Description of Artificial Sequence: Synthetic oligonucleotide"
ugaggagacacggguaggacuuucu

SEQ ID NO: 2482 - RNA, 25 nt, Artificial Sequence
  source: /note="Description of Artificial Sequence: Synthetic oligonucleotide"
cauucuuuaaagagccaaguugcuu

SEQ ID NO: 2483 - RNA, 25 nt, Artificial Sequence
  source: /note="Description of Artificial Sequence: Synthetic oligonucleotide"
auucuuuaaagagccaaguugcuuc

SEQ ID NO: 2484 - RNA, 25 nt, Artificial Sequence
  source: /note="Description of Artificial Sequence: Synthetic oligonucleotide"
uucuuuaaagagccaaguugcuucg

SEQ ID NO: 2485 - RNA, 25 nt, Artificial Sequence
  source: /note="Description of Artificial Sequence: Synthetic oligonucleotide"
gccaaguugcuucggggaaacagcc

SEQ ID NO: 2486 - RNA, 25 nt, Artificial Sequence
  source: /note="Description of Artificial Sequence: Synthetic oligonucleotide"
ugcuucggggaaacagccaggaaaa

SEQ ID NO: 2487 - RNA, 25 nt, Artificial Sequence
  source: /note="Description of Artificial Sequence: Synthetic oligonucleotide"
ggaaaauggucaagauuauuuuuag

SEQ ID NO: 2488 - RNA, 25 nt, Artificial Sequence
  source: /note="Description of Artificial Sequence: Synthetic oligonucleotide"
agauuauuuuuagagguuauuuuau

SEQ ID NO: 2489 - RNA, 25 nt, Artificial Sequence
  source: /note="Description of Artificial Sequence: Synthetic oligonucleotide"
gauuauuuuuagagguuauuuuauu

SEQ ID NO: 2490 - RNA, 25 nt, Artificial Sequence
  source: /note="Description of Artificial Sequence: Synthetic oligonucleotide"
auuauuuuuagagguuauuuuauug

SEQ ID NO: 2491 - RNA, 25 nt, Artificial Sequence
  source: /note="Description of Artificial Sequence: Synthetic oligonucleotide"
uaacaucuugaguuauuuuuaauuc

SEQ ID NO: 2492 - RNA, 25 nt, Artificial Sequence
  source: /note="Description of Artificial Sequence: Synthetic oligonucleotide"
aacaucuugaguuauuuuuaauuca

SEQ ID NO: 2493 - RNA, 25 nt, Artificial Sequence
  source: /note="Description of Artificial Sequence: Synthetic oligonucleotide"
acaucuugaguuauuuuuaauucag

SEQ ID NO: 2494 - RNA, 25 nt, Artificial Sequence
  source: /note="Description of Artificial Sequence: Synthetic oligonucleotide"
caucuugaguuauuuuuaauucagg

SEQ ID NO: 2495 - RNA, 25 nt, Artificial Sequence
  source: /note="Description of Artificial Sequence: Synthetic oligonucleotide"
gaguuauuuuuaauucagggggaug

SEQ ID NO: 2496 - RNA, 25 nt, Artificial Sequence
  source: /note="Description of Artificial Sequence: Synthetic oligonucleotide"
auuuuuaauucagggggauguggaa

SEQ ID NO: 2497 - RNA, 25 nt, Artificial Sequence
  source: /note="Description of Artificial Sequence: Synthetic oligonucleotide"
guuuuguuguagcuuaguauccaua

SEQ ID NO: 2498 - RNA, 25 nt, Artificial Sequence
  source: /note="Description of Artificial Sequence: Synthetic oligonucleotide"
uuuuguuguagcuuaguauccauaa

SEQ ID NO: 2499 - RNA, 25 nt, Artificial Sequence
  source: /note="Description of Artificial Sequence: Synthetic oligonucleotide"
gcagcuuuuguuuucuguauguugu

SEQ ID NO: 2500 - RNA, 25 nt, Artificial Sequence
  source: /note="Description of Artificial Sequence: Synthetic oligonucleotide"
cagcuuuuguuuucuguauguuguu

SEQ ID NO: 2501 - RNA, 25 nt, Artificial Sequence
  source: /note="Description of Artificial Sequence: Synthetic oligonucleotide"
agcuuuuguuuucuguauguuguug

SEQ ID NO: 2502 - RNA, 25 nt, Artificial Sequence
  source: /note="Description of Artificial Sequence: Synthetic oligonucleotide"
gcuuuuguuuucuguauguuguugg

SEQ ID NO: 2503 - RNA, 25 nt, Artificial Sequence
  source: /note="Description of Artificial Sequence: Synthetic oligonucleotide"
ucaacuuucacacauagcaagcaca

SEQ ID NO: 2504 - RNA, 25 nt, Artificial Sequence
  source: /note="Description of Artificial Sequence: Synthetic oligonucleotide"
gcaagcacauggccucccugauguc

SEQ ID NO: 2505 - RNA, 25 nt, Artificial Sequence
  source: /note="Description of Artificial Sequence: Synthetic oligonucleotide"
ucccugaugucaggaugccuuuguu

SEQ ID NO: 2506 - RNA, 25 nt, Artificial Sequence
  source: /note="Description of Artificial Sequence: Synthetic oligonucleotide"
cuaaaaauuuguuccuuuuucacua

SEQ ID NO: 2507 - RNA, 25 nt, Artificial Sequence
  source: /note="Description of Artificial Sequence: Synthetic oligonucleotide"
uaaaaauuuguuccuuuuucacuau

SEQ ID NO: 2508 - RNA, 25 nt, Artificial Sequence
  source: /note="Description of Artificial Sequence: Synthetic oligonucleotide"
uuuuucacuaugggcaguucacaca

SEQ ID NO: 2509 - RNA, 25 nt, Artificial Sequence
  source: /note="Description of Artificial Sequence: Synthetic oligonucleotide"
cacaaggcaaaaacuauugaacagu

SEQ ID NO: 2510 - RNA, 25 nt, Artificial Sequence
  source: /note="Description of Artificial Sequence: Synthetic oligonucleotide"
ugauucuuuuauuaauaaaagcuaa

SEQ ID NO: 2511 - RNA, 25 nt, Artificial Sequence
  source: /note="Description of Artificial Sequence: Synthetic oligonucleotide"
gauucuuuuauuaauaaaagcuaau

SEQ ID NO: 2512 - RNA, 25 nt, Artificial Sequence
  source: /note="Description of Artificial Sequence: Synthetic oligonucleotide"
uuuauuaauaaaagcuaaugggaaa

SEQ ID NO: 2513 - RNA, 25 nt, Artificial Sequence
  source: /note="Description of Artificial Sequence: Synthetic oligonucleotide"
uuuauugauaaaucuauccuuuaaa

SEQ ID NO: 2514 - RNA, 25 nt, Artificial Sequence
  source: /note="Description of Artificial Sequence: Synthetic oligonucleotide"
cuauccuuuaaaaggaauacguuuu

SEQ ID NO: 2515 - RNA, 25 nt, Artificial Sequence
  source: /note="Description of Artificial Sequence: Synthetic oligonucleotide"
aauaguuuauguagagaaacauuag

SEQ ID NO: 2516 - RNA, 25 nt, Artificial Sequence
  source: /note="Description of Artificial Sequence: Synthetic oligonucleotide"
uuaauugucuccccaccuauauuua

SEQ ID NO: 2517 - RNA, 25 nt, Artificial Sequence
  source: /note="Description of Artificial Sequence: Synthetic oligonucleotide"
uaauugucuccccaccuauauuuau

SEQ ID NO: 2518 - RNA, 25 nt, Artificial Sequence
  source: /note="Description of Artificial Sequence: Synthetic oligonucleotide"
aguaaaaguguauuuguaaacugua

SEQ ID NO: 2519 - RNA, 25 nt, Artificial Sequence
  source: /note="Description of Artificial Sequence: Synthetic oligonucleotide"
guaaaaguguauuuguaaacuguau

SEQ ID NO: 2520 - RNA, 25 nt, Artificial Sequence
  source: /note="Description of Artificial Sequence: Synthetic oligonucleotide"
guaaacuguaugggaacuaaaaauu

SEQ ID NO: 2521 - RNA, 25 nt, Artificial Sequence
  source: /note="Description of Artificial Sequence: Synthetic oligonucleotide"
ggaauaaaaccauuuucuuauauga

SEQ ID NO: 2522 - RNA, 25 nt, Artificial Sequence
  source: /note="Description of Artificial Sequence: Synthetic oligonucleotide"
gggagagggugaaaguccacaucug

SEQ ID NO: 2523 - RNA, 25 nt, Artificial Sequence
  source: /note="Description of Artificial Sequence: Synthetic oligonucleotide"
agggagagggugaaaguccacaucu

SEQ ID NO: 2524 - RNA, 25 nt, Artificial Sequence
  source: /note="Description of Artificial Sequence: Synthetic oligonucleotide"
uagggagagggugaaaguccacauc

SEQ ID NO: 2525 - RNA, 25 nt, Artificial Sequence
  source: /note="Description of Artificial Sequence: Synthetic oligonucleotide"
ucuguucuugaucuuuuuagggaga

SEQ ID NO: 2526 - RNA, 25 nt, Artificial Sequence
  source: /note="Description of Artificial Sequence: Synthetic oligonucleotide"
gucuguucuugaucuuuuuagggag

SEQ ID NO: 2527 - RNA, 25 nt, Artificial Sequence
  source: /note="Description of Artificial Sequence: Synthetic oligonucleotide"
cuugcgucuguucuugaucuuuuua

SEQ ID NO: 2528 - RNA, 25 nt, Artificial Sequence
  source: /note="Description of Artificial Sequence: Synthetic oligonucleotide"
ucuugcgucuguucuugaucuuuuu

SEQ ID NO: 2529 - RNA, 25 nt, Artificial Sequence
  source: /note="Description of Artificial Sequence: Synthetic oligonucleotide"
augguuucaaauuuugcuuaucaaa

SEQ ID NO: 2530 - RNA, 25 nt, Artificial Sequence
  source: /note="Description of Artificial Sequence: Synthetic oligonucleotide"
gaguuaaaauacaguggucuuuaaa

SEQ ID NO: 2531 - RNA, 25 nt, Artificial Sequence
  source: /note="Description of Artificial Sequence: Synthetic oligonucleotide"
cagguauuguugaguuaaaauacag

SEQ ID NO: 2532 - RNA, 25 nt, Artificial Sequence
  source: /note="Description of Artificial Sequence: Synthetic oligonucleotide"
cugaggaaaugaguaauugggaagc

SEQ ID NO: 2533 - RNA, 25 nt, Artificial Sequence
  source: /note="Description of Artificial Sequence: Synthetic oligonucleotide"
uucuuaucugaggaaaugaguaauu

SEQ ID NO: 2534 - RNA, 25 nt, Artificial Sequence
  source: /note="Description of Artificial Sequence: Synthetic oligonucleotide"
cuucuuaucugaggaaaugaguaau

SEQ ID NO: 2535 - RNA, 25 nt, Artificial Sequence
  source: /note="Description of Artificial Sequence: Synthetic oligonucleotide"
uguagagaugauuucuucuuaucug

SEQ ID NO: 2536 - RNA, 25 nt, Artificial Sequence
  source: /note="Description of Artificial Sequence: Synthetic oligonucleotide"
ggaaaaaaaaaauuaaacugguuaa

SEQ ID NO: 2537 - RNA, 25 nt, Artificial Sequence
  source: /note="Description of Artificial Sequence: Synthetic oligonucleotide"
aggaaaaaaaaaauuaaacugguua

SEQ ID NO: 2538 - RNA, 25 nt, Artificial Sequence
  source: /note="Description of Artificial Sequence: Synthetic oligonucleotide"
acaaugaggaaaaaaaaaauuaaac

SEQ ID NO: 2539 - RNA, 25 nt, Artificial Sequence
  source: /note="Description of Artificial Sequence: Synthetic oligonucleotide"
uuucuucucaucauccccaacaaug

SEQ ID NO: 2540 - RNA, 25 nt, Artificial Sequence
  source: /note="Description of Artificial Sequence: Synthetic oligonucleotide"
uaaaugagauuguucucacuuuucu

SEQ ID NO: 2541 - RNA, 25 nt, Artificial Sequence
  source: /note="Description of Artificial Sequence: Synthetic oligonucleotide"
gaauuauccacuacuggauacauga

SEQ ID NO: 2542 - RNA, 25 nt, Artificial Sequence
  source: /note="Description of Artificial Sequence: Synthetic oligonucleotide"
gccaucaaaaugaauuauccacuac

SEQ ID NO: 2543 - RNA, 25 nt, Artificial Sequence
  source: /note="Description of Artificial Sequence: Synthetic oligonucleotide"
cucaggcacuggcuuaauucucauu

SEQ ID NO: 2544 - RNA, 25 nt, Artificial Sequence
  source: /note="Description of Artificial Sequence: Synthetic oligonucleotide"
gucaacuucugacagucucaggcac

SEQ ID NO: 2545 - RNA, 25 nt, Artificial Sequence
  source: /note="Description of Artificial Sequence: Synthetic oligonucleotide"
gcaaaggucaacuucugacagucuc

SEQ ID NO: 2546 - RNA, 25 nt, Artificial Sequence
  source: /note="Description of Artificial Sequence: Synthetic oligonucleotide"
cuaugacucuuuaaugccagugcaa

SEQ ID NO: 2547 - RNA, 25 nt, Artificial Sequence
  source: /note="Description of Artificial Sequence: Synthetic oligonucleotide"
agccgaacuauaauuggucaacggc

SEQ ID NO: 2548 - RNA, 25 nt, Artificial Sequence
  source: /note="Description of Artificial Sequence: Synthetic oligonucleotide"
caacagccgaacuauaauuggucaa

SEQ ID NO: 2549 - RNA, 25 nt, Artificial Sequence
  source: /note="Description of Artificial Sequence: Synthetic oligonucleotide"
ucucagucaacagccgaacuauaau

SEQ ID NO: 2550 - RNA, 25 nt, Artificial Sequence
  source: /note="Description of Artificial Sequence: Synthetic oligonucleotide"
caauuauucaaaugcaaagaaaaua

SEQ ID NO: 2551 - RNA, 25 nt, Artificial Sequence
  source: /note="Description of Artificial Sequence: Synthetic oligonucleotide"
ucguuguuuuggcgaccaaaaacac

SEQ ID NO: 2552 - RNA, 25 nt, Artificial Sequence
  source: /note="Description of Artificial Sequence: Synthetic oligonucleotide"
aacccuauucaaacagucguuguuu

SEQ ID NO: 2553 - RNA, 25 nt, Artificial Sequence
  source: /note="Description of Artificial Sequence: Synthetic oligonucleotide"
ccaaaaaaauucggugauuucaaaa

SEQ ID NO: 2554 - RNA, 25 nt, Artificial Sequence
  source: /note="Description of Artificial Sequence: Synthetic oligonucleotide"
uccaaaaaaauucggugauuucaaa

SEQ ID NO: 2555 - RNA, 25 nt, Artificial Sequence
  source: /note="Description of Artificial Sequence: Synthetic oligonucleotide"
gagucuaacugauugucaacccccg

SEQ ID NO: 2556 - RNA, 25 nt, Artificial Sequence
  source: /note="Description of Artificial Sequence: Synthetic oligonucleotide"
ggucgagucuaacugauugucaacc

SEQ ID NO: 2557 - RNA, 25 nt, Artificial Sequence
  source: /note="Description of Artificial Sequence: Synthetic oligonucleotide"
gggucgagucuaacugauugucaac

SEQ ID NO: 2558 - RNA, 25 nt, Artificial Sequence
  source: /note="Description of Artificial Sequence: Synthetic oligonucleotide"
cgggucgagucuaacugauugucaa

SEQ ID NO: 2559 - RNA, 25 nt, Artificial Sequence
  source: /note="Description of Artificial Sequence: Synthetic oligonucleotide"
ucgggucgagucuaacugauuguca

SEQ ID NO: 2560 - RNA, 25 nt, Artificial Sequence
  source: /note="Description of Artificial Sequence: Synthetic oligonucleotide"
ugguguacucaccgguggacguccg

SEQ ID NO: 2561 - RNA, 25 nt, Artificial Sequence
  source: /note="Description of Artificial Sequence: Synthetic oligonucleotide"
cgacugguguacucaccgguggacg

SEQ ID NO: 2562 - RNA, 25 nt, Artificial Sequence
  source: /note="Description of Artificial Sequence: Synthetic oligonucleotide"
aggcggcuggacgacugguguacuc

SEQ ID NO: 2563 - RNA, 25 nt, Artificial Sequence
  source: /note="Description of Artificial Sequence: Synthetic oligonucleotide"
gcuucuuccucucugaguccugacg

SEQ ID NO: 2564 - RNA, 25 nt, Artificial Sequence
  source: /note="Description of Artificial Sequence: Synthetic oligonucleotide"
ucugaugugcuucuuccucucugag

SEQ ID NO: 2565 - RNA, 25 nt, Artificial Sequence
  source: /note="Description of Artificial Sequence: Synthetic oligonucleotide"
cggugacuuucucugaugugcuucu

SEQ ID NO: 2566 - RNA, 25 nt, Artificial Sequence
  source: /note="Description of Artificial Sequence: Synthetic oligonucleotide"
cucuccagaucgaugggacggucgg

SEQ ID NO: 2567 - RNA, 25 nt, Artificial Sequence
  source: /note="Description of Artificial Sequence: Synthetic oligonucleotide"
aacccucgagacucgacguacacuc

SEQ ID NO: 2568 - RNA, 25 nt, Artificial Sequence
  source: /note="Description of Artificial Sequence: Synthetic oligonucleotide"
accgguaaagacgaaaacucgagaa

SEQ ID NO: 2569 - RNA, 25 nt, Artificial Sequence
  source: /note="Description of Artificial Sequence: Synthetic oligonucleotide"
gaccgguaaagacgaaaacucgaga

SEQ ID NO: 2570 - RNA, 25 nt, Artificial Sequence
  source: /note="Description of Artificial Sequence: Synthetic oligonucleotide"
agaccugaauucaaaagucuuccgg

SEQ ID NO: 2571 - RNA, 25 nt, Artificial Sequence
  source: /note="Description of Artificial Sequence: Synthetic oligonucleotide"
uguuaagaccugaauucaaaagucu

SEQ ID NO: 2572 - RNA, 25 nt, Artificial Sequence
  source: /note="Description of Artificial Sequence: Synthetic oligonucleotide"
ucaucuucccugugacacuguuaag

SEQ ID NO: 2573 - RNA, 25 nt, Artificial Sequence
  source: /note="Description of Artificial Sequence: Synthetic oligonucleotide"
aguaguaguuaucucccuucaucuu

SEQ ID NO: 2574 - RNA, 25 nt, Artificial Sequence
  source: /note="Description of Artificial Sequence: Synthetic oligonucleotide"
uaguaguaguuaucucccuucaucu

SEQ ID NO: 2575 - RNA, 25 nt, Artificial Sequence
  source: /note="Description of Artificial Sequence: Synthetic oligonucleotide"
guaguaguaguaguaguaguuaucu

SEQ ID NO: 2576 - RNA, 25 nt, Artificial Sequence
  source: /note="Description of Artificial Sequence: Synthetic oligonucleotide"
aguaguaguaguaguaguaguuauc

SEQ ID NO: 2577 - RNA, 25 nt, Artificial Sequence
  source: /note="Description of Artificial Sequence: Synthetic oligonucleotide"
cgaacacugaacaaaucauucaucu

SEQ ID NO: 2578 - RNA, 25 nt, Artificial Sequence
  source: /note="Description of Artificial Sequence: Synthetic oligonucleotide"
ccgaacacugaacaaaucauucauc

SEQ ID NO: 2579 - RNA, 25 nt, Artificial Sequence
  source: /note="Description of Artificial Sequence: Synthetic oligonucleotide"
gugugggaaaagaacuuagacucga

SEQ ID NO: 2580 - RNA, 25 nt, Artificial Sequence
  source: /note="Description of Artificial Sequence: Synthetic oligonucleotide"
agugugggaaaagaacuuagacucg

SEQ ID NO: 2581 - RNA, 25 nt, Artificial Sequence
  source: /note="Description of Artificial Sequence: Synthetic oligonucleotide"
ugguugugaccgucuguuagacuag

SEQ ID NO: 2582 - RNA, 25 nt, Artificial Sequence
  source: /note="Description of Artificial Sequence: Synthetic oligonucleotide"
uaauauccuugguuuuccauggcac

SEQ ID NO: 2583 - RNA, 25 nt, Artificial Sequence
  source: /note="Description of Artificial Sequence: Synthetic oligonucleotide"
uuuugcuaauauccuugguuuucca

SEQ ID NO: 2584 - RNA, 25 nt, Artificial Sequence
  source: /note="Description of Artificial Sequence: Synthetic oligonucleotide"
caacuucugcuuuugcuaauauccu

SEQ ID NO: 2585 - RNA, 25 nt, Artificial Sequence
  source: /note="Description of Artificial Sequence: Synthetic oligonucleotide"
uacuguaagcagcuucggcuuccca

SEQ ID NO: 2586 - RNA, 25 nt, Artificial Sequence
  source: /note="Description of Artificial Sequence: Synthetic oligonucleotide"
uugucccagcuacuguaagcagcuu

SEQ ID NO: 2587 - RNA, 25 nt, Artificial Sequence
  source: /note="Description of Artificial Sequence: Synthetic oligonucleotide"
agaaaucauucaggaagcuucuuga

SEQ ID NO: 2588 - RNA, 25 nt, Artificial Sequence
  source: /note="Description of Artificial Sequence: Synthetic oligonucleotide"
ggcucagggcuagcagaaaucauuc

SEQ ID NO: 2589 - RNA, 25 nt, Artificial Sequence
  source: /note="Description of Artificial Sequence: Synthetic oligonucleotide"
agugcugguuccaaaaauaggcuca

SEQ ID NO: 2590 - RNA, 25 nt, Artificial Sequence
  source: /note="Description of Artificial Sequence: Synthetic oligonucleotide"
aagugcugguuccaaaaauaggcuc

SEQ ID NO: 2591 - RNA, 25 nt, Artificial Sequence
  source: /note="Description of Artificial Sequence: Synthetic oligonucleotide"
uuccccaagugcugguuccaaaaau

SEQ ID NO: 2592 - RNA, 25 nt, Artificial Sequence
  source: /note="Description of Artificial Sequence: Synthetic oligonucleotide"
ucacaagaucaguuuccccaagugc

SEQ ID NO: 2593 - RNA, 25 nt, Artificial Sequence
  source: /note="Description of Artificial Sequence: Synthetic oligonucleotide"
caagucuggggaugccccagugggg

SEQ ID NO: 2594 - RNA, 25 nt, Artificial Sequence
  source: /note="Description of Artificial Sequence: Synthetic oligonucleotide"
ucccaagucuggggaugccccagug

SEQ ID NO: 2595 - RNA, 25 nt, Artificial Sequence
  source: /note="Description of Artificial Sequence: Synthetic oligonucleotide"
uucccaagucuggggaugccccagu

SEQ ID NO: 2596 - RNA, 25 nt, Artificial Sequence
  source: /note="Description of Artificial Sequence: Synthetic oligonucleotide"
uuucccaagucuggggaugccccag

SEQ ID NO: 2597 - RNA, 25 nt, Artificial Sequence
  source: /note="Description of Artificial Sequence: Synthetic oligonucleotide"
gaaagagucacguuucccaagucug

SEQ ID NO: 2598 - RNA, 25 nt, Artificial Sequence
  source: /note="Description of Artificial Sequence: Synthetic oligonucleotide"
agaaagagucacguuucccaagucu

SEQ ID NO: 2599 - RNA, 25 nt, Artificial Sequence
  source: /note="Description of Artificial Sequence: Synthetic oligonucleotide"
aagaaagagucacguuucccaaguc

SEQ ID NO: 2600 - RNA, 25 nt, Artificial Sequence
  source: /note="Description of Artificial Sequence: Synthetic oligonucleotide"
ucacuguggccugacuaaaacccag

SEQ ID NO: 2601 - RNA, 25 nt, Artificial Sequence
  source: /note="Description of Artificial Sequence: Synthetic oligonucleotide"
cuguuagggcuguuccuucucacug

SEQ ID NO: 2602 - RNA, 25 nt, Artificial Sequence
  source: /note="Description of Artificial Sequence: Synthetic oligonucleotide"
auucaaccuggcuggaggccuguua

SEQ ID NO: 2603 - RNA, 25 nt, Artificial Sequence
  source: /note="Description of Artificial Sequence: Synthetic oligonucleotide"
cauucaaccuggcuggaggccuguu

SEQ ID NO: 2604 - RNA, 25 nt, Artificial Sequence
  source: /note="Description of Artificial Sequence: Synthetic oligonucleotide"
aaaugagcucauucaaccuggcugg

SEQ ID NO: 2605 - RNA, 25 nt, Artificial Sequence
  source: /note="Description of Artificial Sequence: Synthetic oligonucleotide"
caaaaaugagcucauucaaccuggc

SEQ ID NO: 2606 - RNA, 25 nt, Artificial Sequence
  source: /note="Description of Artificial Sequence: Synthetic oligonucleotide"
acaacaaaaaugagcucauucaacc

SEQ ID NO: 2607 - RNA, 25 nt, Artificial Sequence
  source: /note="Description of Artificial Sequence: Synthetic oligonucleotide"
uagaacauuagcaaaucuuacuggu

SEQ ID NO: 2608 - RNA, 25 nt, Artificial Sequence
  source: /note="Description of Artificial Sequence: Synthetic oligonucleotide"
aauguagaacauuagcaaaucuuac

SEQ ID NO: 2609 - RNA, 25 nt, Artificial Sequence
  source: /note="Description of Artificial Sequence: Synthetic oligonucleotide"
aggcaaagagggaugucuuuggaga

SEQ ID NO: 2610 - RNA, 25 nt, Artificial Sequence
  source: /note="Description of Artificial Sequence: Synthetic oligonucleotide"
cauaugaggcaaagagggaugucuu

SEQ ID NO: 2611 - RNA, 25 nt, Artificial Sequence
  source: /note="Description of Artificial Sequence: Synthetic oligonucleotide"
gaugauucaacauaugaggcaaaga

SEQ ID NO: 2612 - RNA, 25 nt, Artificial Sequence
  source: /note="Description of Artificial Sequence: Synthetic oligonucleotide"
ggaugauucaacauaugaggcaaag

SEQ ID NO: 2613 - RNA, 25 nt, Artificial Sequence
  source: /note="Description of Artificial Sequence: Synthetic oligonucleotide"
uccgcacuggaugauucaacauaug

SEQ ID NO: 2614 - RNA, 25 nt, Artificial Sequence
  source: /note="Description of Artificial Sequence: Synthetic oligonucleotide"
gauauuuucauugaaauauccgcac

SEQ ID NO: 2615 - RNA, 25 nt, Artificial Sequence
  source: /note="Description of Artificial Sequence: Synthetic oligonucleotide"
agaauccaaggaggccacaacuuca

SEQ ID NO: 2616 - RNA, 25 nt, Artificial Sequence
  source: /note="Description of Artificial Sequence: Synthetic oligonucleotide"
aagccaaagucagaagaauccaagg

SEQ ID NO: 2617 - RNA, 25 nt, Artificial Sequence
  source: /note="Description of Artificial Sequence: Synthetic oligonucleotide"
cagaagccaaagucagaagaaucca

SEQ ID NO: 2618 - RNA, 25 nt, Artificial Sequence
  source: /note="Description of Artificial Sequence: Synthetic oligonucleotide"
aggaacuaccaccagggcuggaucu

SEQ ID NO: 2619 - RNA, 25 nt, Artificial Sequence
  source: /note="Description of Artificial Sequence: Synthetic oligonucleotide"
cucagaaaggaacuaccaccagggc

SEQ ID NO: 2620 - RNA, 25 nt, Artificial Sequence
  source: /note="Description of Artificial Sequence: Synthetic oligonucleotide"
agaccucagaaaggaacuaccacca

SEQ ID NO: 2621 - RNA, 25 nt, Artificial Sequence
  source: /note="Description of Artificial Sequence: Synthetic oligonucleotide"
gagaccucagaaaggaacuaccacc

SEQ ID NO: 2622 - RNA, 25 nt, Artificial Sequence
  source: /note="Description of Artificial Sequence: Synthetic oligonucleotide"
cucaagggacugagagaccucagaa

SEQ ID NO: 2623 - RNA, 25 nt, Artificial Sequence
  source: /note="Description of Artificial Sequence: Synthetic oligonucleotide"
cagccaaacuaccccaaagucucaa

SEQ ID NO: 2624 - RNA, 25 nt, Artificial Sequence
  source: /note="Description of Artificial Sequence: Synthetic oligonucleotide"
gcagccaaacuaccccaaagucuca

SEQ ID NO: 2625 - RNA, 25 nt, Artificial Sequence
  source: /note="Description of Artificial Sequence: Synthetic oligonucleotide"
cugauauacauuuugucagugagaa

SEQ ID NO: 2626 - RNA, 25 nt, Artificial Sequence
  source: /note="Description of Artificial Sequence: Synthetic oligonucleotide"
aaggaauauugggggguggaggugg

SEQ ID NO: 2627 - RNA, 25 nt, Artificial Sequence
  source: /note="Description of Artificial Sequence: Synthetic oligonucleotide"
caaggaauauugggggguggaggug

SEQ ID NO: 2628 - RNA, 25 nt, Artificial Sequence
  source: /note="Description of Artificial Sequence: Synthetic oligonucleotide"
ucaaggaauauugggggguggaggu

SEQ ID NO: 2629 - RNA, 25 nt, Artificial Sequence
  source: /note="Description of Artificial Sequence: Synthetic oligonucleotide"
uucaaggaauauugggggguggagg

SEQ ID NO: 2630 - RNA, 25 nt, Artificial Sequence
  source: /note="Description of Artificial Sequence: Synthetic oligonucleotide"
aaguucaaggaauauuggggggugg

SEQ ID NO: 2631 - RNA, 25 nt, Artificial Sequence
  source: /note="Description of Artificial Sequence: Synthetic oligonucleotide"
ucaaaguucaaggaauauugggggg

SEQ ID NO: 2632 - RNA, 25 nt, Artificial Sequence
  source: /note="Description of Artificial Sequence: Synthetic oligonucleotide"
aauucaaaguucaaggaauauuggg

SEQ ID NO: 2633 - RNA, 25 nt, Artificial Sequence
  source: /note="Description of Artificial Sequence: Synthetic oligonucleotide"
caauucaaaguucaaggaauauugg

SEQ ID NO: 2634 - RNA, 25 nt, Artificial Sequence
  source: /note="Description of Artificial Sequence: Synthetic oligonucleotide"
gcaauucaaaguucaaggaauauug

SEQ ID NO: 2635 - RNA, 25 nt, Artificial Sequence
  source: /note="Description of Artificial Sequence: Synthetic oligonucleotide"
agcaauucaaaguucaaggaauauu

SEQ ID NO: 2636 - RNA, 25 nt, Artificial Sequence
  source: /note="Description of Artificial Sequence: Synthetic oligonucleotide"
aagcaauucaaaguucaaggaauau

SEQ ID NO: 2637 - RNA, 25 nt, Artificial Sequence
  source: /note="Description of Artificial Sequence: Synthetic oligonucleotide"
guguucugaagcaauucaaaguuca

SEQ ID NO: 2638 - RNA, 25 nt, Artificial Sequence
  source: /note="Description of Artificial Sequence: Synthetic oligonucleotide"
acuucccuaauaagggaauaccuuc

SEQ ID NO: 2639 - RNA, 25 nt, Artificial Sequence
  source: /note="Description of Artificial Sequence: Synthetic oligonucleotide"
gacagcagugacacuucccuaauaa

SEQ ID NO: 2640 - RNA, 25 nt, Artificial Sequence
  source: /note="Description of Artificial Sequence: Synthetic oligonucleotide"
agacagcagugacacuucccuaaua

SEQ ID NO: 2641 - RNA, 25 nt, Artificial Sequence
  source: /note="Description of Artificial Sequence: Synthetic oligonucleotide"
aagcuucuugcugcaaauacugaac

SEQ ID NO: 2642 - RNA, 25 nt, Artificial Sequence
  source: /note="Description of Artificial Sequence: Synthetic oligonucleotide"
aagucaagacaaaaccaaagcaaaa

SEQ ID NO: 2643 - RNA, 25 nt, Artificial Sequence
  source: /note="Description of Artificial Sequence: Synthetic oligonucleotide"
uuuguacaaucaaacucuugugugc

SEQ ID NO: 2644 - RNA, 25 nt, Artificial Sequence
  source: /note="Description of Artificial Sequence: Synthetic oligonucleotide"
auaaaagcaacugaucuuaagcaac

SEQ ID NO: 2645 - RNA, 25 nt, Artificial Sequence
  source: /note="Description of Artificial Sequence: Synthetic oligonucleotide"
ucuuauaacaaaacuagccaagauc

SEQ ID NO: 2646 - RNA, 25 nt, Artificial Sequence
  source: /note="Description of Artificial Sequence: Synthetic oligonucleotide"
caugauaguuugcugaccucgugga

SEQ ID NO: 2647 - RNA, 25 nt, Artificial Sequence
  source: /note="Description of Artificial Sequence: Synthetic oligonucleotide"
acaugauaguuugcugaccucgugg

SEQ ID NO: 2648 - RNA, 25 nt, Artificial Sequence
  source: /note="Description of Artificial Sequence: Synthetic oligonucleotide"
agaacaugauaguuugcugaccucg

SEQ ID NO: 2649 - RNA, 25 nt, Artificial Sequence
  source: /note="Description of Artificial Sequence: Synthetic oligonucleotide"
cuagggacuaugauaacucuggccu

SEQ ID NO: 2650 - RNA, 25 nt, Artificial Sequence
  source: /note="Description of Artificial Sequence: Synthetic oligonucleotide"
agcaaccuagggacuaugauaacuc

SEQ ID NO: 2651 - RNA, 25 nt, Artificial Sequence
  source: /note="Description of Artificial Sequence: Synthetic oligonucleotide"
gcacaugauaagccguagcaaccua

SEQ ID NO: 2652 - RNA, 25 nt, Artificial Sequence
  source: /note="Description of Artificial Sequence: Synthetic oligonucleotide"
agcacaugauaagccguagcaaccu

SEQ ID NO: 2653 - RNA, 25 nt, Artificial Sequence
  source: /note="Description of Artificial Sequence: Synthetic oligonucleotide"
cugacuuccucagaaaccaccucuu

SEQ ID NO: 2654 - RNA, 25 nt, Artificial Sequence
  source: /note="Description of Artificial Sequence: Synthetic oligonucleotide"
acccauuacugacugcucuggcccu

SEQ ID NO: 2655 - RNA, 25 nt, Artificial Sequence
  source: /note="Description of Artificial Sequence: Synthetic oligonucleotide"
cacccauuacugacugcucuggccc

SEQ ID NO: 2656 - RNA, 25 nt, Artificial Sequence
  source: /note="Description of Artificial Sequence: Synthetic oligonucleotide"
cucauucacccauuacugacugcuc

SEQ ID NO: 2657 - RNA, 25 nt, Artificial Sequence
  source: /note="Description of Artificial Sequence: Synthetic oligonucleotide"
uacccaccagcaaccuagaaguaga

SEQ ID NO: 2658 - RNA, 25 nt, Artificial Sequence
  source: /note="Description of Artificial Sequence: Synthetic oligonucleotide"
uaauuuuaaaauccucagugagcua

SEQ ID NO: 2659 - RNA, 25 nt, Artificial Sequence
  source: /note="Description of Artificial Sequence: Synthetic oligonucleotide"
aaaaaguuauuaagacugugaaauu

SEQ ID NO: 2660 - RNA, 25 nt, Artificial Sequence
  source: /note="Description of Artificial Sequence: Synthetic oligonucleotide"
cauaaguuucagaagggccacacac

SEQ ID NO: 2661 - RNA, 25 nt, Artificial Sequence
  source: /note="Description of Artificial Sequence: Synthetic oligonucleotide"
ggagagaugaccauaaguuucagaa

SEQ ID NO: 2662 - RNA, 25 nt, Artificial Sequence
  source: /note="Description of Artificial Sequence: Synthetic oligonucleotide"
gggagagaugaccauaaguuucaga

SEQ ID NO: 2663 - RNA, 25 nt, Artificial Sequence
  source: /note="Description of Artificial Sequence: Synthetic oligonucleotide"
cauuugaaaagaccuugguuucagu

SEQ ID NO: 2664 - RNA, 25 nt, Artificial Sequence
  source: /note="Description of Artificial Sequence: Synthetic oligonucleotide"
acauuugaaaagaccuugguuucag

SEQ ID NO: 2665 - RNA, 25 nt, Artificial Sequence
  source: /note="Description of Artificial Sequence: Synthetic oligonucleotide"
cauuuagccacauuugaaaagaccu

SEQ ID NO: 2666 - RNA, 25 nt, Artificial Sequence
  source: /note="Description of Artificial Sequence: Synthetic oligonucleotide"
uccuggcuguuuccccgaagcaacu

SEQ ID NO: 2667 - RNA, 25 nt, Artificial Sequence
  source: /note="Description of Artificial Sequence: Synthetic oligonucleotide"
cuaaaaauaaucuugaccauuuucc

SEQ ID NO: 2668 - RNA, 25 nt, Artificial Sequence
  source: /note="Description of Artificial Sequence: Synthetic oligonucleotide"
augucuauagucuaaguuucccuua

SEQ ID NO: 2669 - RNA, 25 nt, Artificial Sequence
  source: /note="Description of Artificial Sequence: Synthetic oligonucleotide"
aacauacagaaaacaaaagcugcac

SEQ ID NO: 2670 - RNA, 25 nt, Artificial Sequence
  source: /note="Description of Artificial Sequence: Synthetic oligonucleotide"
uaacaaaggcauccugacaucaggg

SEQ ID NO: 2671 - RNA, 25 nt, Artificial Sequence
  source: /note="Description of Artificial Sequence: Synthetic oligonucleotide"
uccuaacaaaggcauccugacauca

SEQ ID NO: 2672 - RNA, 25 nt, Artificial Sequence
  source: /note="Description of Artificial Sequence: Synthetic oligonucleotide"
auccuaacaaaggcauccugacauc

SEQ ID NO: 2673 - RNA, 25 nt, Artificial Sequence
  source: /note="Description of Artificial Sequence: Synthetic oligonucleotide"
uaagggcaaauacagauccuaacaa

SEQ ID NO: 2674 - RNA, 25 nt, Artificial Sequence
  source: /note="Description of Artificial Sequence: Synthetic oligonucleotide"
ggaaaaaagauuucaacaaaauuaa

SEQ ID NO: 2675 - RNA, 25 nt, Artificial Sequence
  source: /note="Description of Artificial Sequence: Synthetic oligonucleotide"
aggaaaaaagauuucaacaaaauua

SEQ ID NO: 2676 - RNA, 25 nt, Artificial Sequence
  source: /note="Description of Artificial Sequence: Synthetic oligonucleotide"
auuuuggaacuuuucaagaggaaga

SEQ ID NO: 2677 - RNA, 25 nt, Artificial Sequence
  source: /note="Description of Artificial Sequence: Synthetic oligonucleotide"
aaacuauauuuuggaacuuuucaag

SEQ ID NO: 2678 - RNA, 25 nt, Artificial Sequence
  source: /note="Description of Artificial Sequence: Synthetic oligonucleotide"
augaaagauacaauaaacuauauuu

SEQ ID NO: 2679 - RNA, 25 nt, Artificial Sequence
  source: /note="Description of Artificial Sequence: Synthetic oligonucleotide"
uugugugaacugcccauagugaaaa

SEQ ID NO: 2680 - RNA, 25 nt, Artificial Sequence
  source: /note="Description of Artificial Sequence: Synthetic oligonucleotide"
uuauuaauuacaugauuugaggcuu

SEQ ID NO: 2681 - RNA, 25 nt, Artificial Sequence
  source: /note="Description of Artificial Sequence: Synthetic oligonucleotide"
ggcaaauuauuaauuacaugauuug

SEQ ID NO: 2682 - RNA, 25 nt, Artificial Sequence
  source: /note="Description of Artificial Sequence: Synthetic oligonucleotide"
aaucacaauuaggucauaaauaaac

SEQ ID NO: 2683 - RNA, 25 nt, Artificial Sequence
  source: /note="Description of Artificial Sequence: Synthetic oligonucleotide"
uuuuauuaauaaaagaaucacaauu

SEQ ID NO: 2684 - RNA, 25 nt, Artificial Sequence
  source: /note="Description of Artificial Sequence: Synthetic oligonucleotide"
guaggucuagucaucagcuuaauca

SEQ ID NO: 2685 - RNA, 25 nt, Artificial Sequence
  source: /note="Description of Artificial Sequence: Synthetic oligonucleotide"
uguaggucuagucaucagcuuaauc

SEQ ID NO: 2686 - RNA, 25 nt, Artificial Sequence
  source: /note="Description of Artificial Sequence: Synthetic oligonucleotide"
cauauacugcaggaaaauuaauugu

SEQ ID NO: 2687 - RNA, 25 nt, Artificial Sequence
  source: /note="Description of Artificial Sequence: Synthetic oligonucleotide"
ucugguacaauacuucauauacugc

SEQ ID NO: 2688 - RNA, 25 nt, Artificial Sequence
  source: /note="Description of Artificial Sequence: Synthetic oligonucleotide"
aaauauuacauaucuuuuaauacuc

SEQ ID NO: 2689 - RNA, 25 nt, Artificial Sequence
  source: /note="Description of Artificial Sequence: Synthetic oligonucleotide"
acauccuaaaacguauuccuuuuaa

SEQ ID NO: 2690 - RNA, 25 nt, Artificial Sequence
  source: /note="Description of Artificial Sequence: Synthetic oligonucleotide"
gacuacauaauauacgugggcaaaa

SEQ ID NO: 2691 - RNA, 25 nt, Artificial Sequence
  source: /note="Description of Artificial Sequence: Synthetic oligonucleotide"
ugcaaauagacuacauaauauacgu

SEQ ID NO: 2692 - RNA, 25 nt, Artificial Sequence
  source: /note="Description of Artificial Sequence: Synthetic oligonucleotide"
uugcaaauagacuacauaauauacg

SEQ ID NO: 2693 - RNA, 25 nt, Artificial Sequence
  source: /note="Description of Artificial Sequence: Synthetic oligonucleotide"
gcgcuaacacccauaaauauaggug

SEQ ID NO: 2694 - RNA, 25 nt, Artificial Sequence
  source: /note="Description of Artificial Sequence: Synthetic oligonucleotide"
ugcgcuaacacccauaaauauaggu

SEQ ID NO: 2695 - RNA, 25 nt, Artificial Sequence
  source: /note="Description of Artificial Sequence: Synthetic oligonucleotide"
uugcgcuaacacccauaaauauagg

SEQ ID NO: 2696 - RNA, 25 nt, Artificial Sequence
  source: /note="Description of Artificial Sequence: Synthetic oligonucleotide"
caguugcgcuaacacccauaaauau

SEQ ID NO: 2697 - RNA, 25 nt, Artificial Sequence
  source: /note="Description of Artificial Sequence: Synthetic oligonucleotide"
cgacaaaugccaucauauaagaaaa

SEQ ID NO: 2698 - DNA, 25 bp, Homo sapiens
gcgcgcagctcacacctggcggccg

SEQ ID NO: 2699 - DNA, 25 bp, Homo sapiens
ctcacacctggcggccgcggtttcc

SEQ ID NO: 2700 - DNA, 25 bp, Homo sapiens
acacctggcggccgcggtttccagg

SEQ ID NO: 2701 - DNA, 25 bp, Homo sapiens
cggccgcggtttccaggaggaagca

SEQ ID NO: 2702 - DNA, 25 bp, Homo sapiens
tttccaggaggaagcaaggatgctt

SEQ ID NO: 2703 - DNA, 25 bp, Homo sapiens
gcaaggatgctttggacactgtgcg

SEQ ID NO: 2704 - DNA, 25 bp, Homo sapiens
ttggacactgtgcgtggcgcctccg

SEQ ID NO: 2705 - DNA, 25 bp, Homo sapiens
cgcggagcccccgcgctgccattcc

SEQ ID NO: 2706 - DNA, 25 bp, Homo sapiens
cgcgctgccattcccggccgtcgct

SEQ ID NO: 2707 - DNA, 25 bp, Homo sapiens
cggccgtcgctcggtcctccgctga

SEQ ID NO: 2708 - DNA, 25 bp, Homo sapiens
ggccgtcgctcggtcctccgctgac

SEQ ID NO: 2709 - DNA, 25 bp, Homo sapiens
gctcggtcctccgctgacgggaagc

SEQ ID NO: 2710 - DNA, 25 bp, Homo sapiens
tcctccgctgacgggaagcaggaag

SEQ ID NO: 2711 - DNA, 25 bp, Homo sapiens
tccgctgacgggaagcaggaagtgg

SEQ ID NO: 2712 - DNA, 25 bp, Homo sapiens
gctgacgggaagcaggaagtggcgg

SEQ ID NO: 2713 - DNA, 25 bp, Homo sapiens
ctgacgggaagcaggaagtggcggc

SEQ ID NO: 2714 - DNA, 25 bp, Homo sapiens
aggaagtggcggcgggcgtcgcgag

SEQ ID NO: 2715 - DNA, 25 bp, Homo sapiens
gcgggcgtcgcgagcggtgacatca

SEQ ID NO: 2716 - DNA, 25 bp, Homo sapiens
cgggcgtcgcgagcggtgacatcac

SEQ ID NO: 2717 - DNA, 25 bp, Homo sapiens
gggcgtcgcgagcggtgacatcacg

SEQ ID NO: 2718 - DNA, 25 bp, Homo sapiens
ggcgtcgcgagcggtgacatcacgg

SEQ ID NO: 2719 - DNA, 25 bp, Homo sapiens
gcgagcggtgacatcacgggggcga

SEQ ID NO: 2720 - DNA, 25 bp, Homo sapiens
agcggtgacatcacgggggcgacgg

SEQ ID NO: 2721 - DNA, 25 bp, Homo sapiens
gacatcacgggggcgacggcggcga

SEQ ID NO: 2722 - DNA, 25 bp, Homo sapiens
acatcacgggggcgacggcggcgaa

SEQ ID NO: 2723 - DNA, 25 bp, Homo sapiens
tcacgggggcgacggcggcgaaggg

SEQ ID NO: 2724 - DNA, 25 bp, Homo sapiens
cacgggggcgacggcggcgaagggc

SEQ ID NO: 2725 - DNA, 25 bp, Homo sapiens
acgggggcgacggcggcgaagggcg

SEQ ID NO: 2726 - DNA, 25 bp, Homo sapiens
cgggggcgacggcggcgaagggcgg

SEQ ID NO: 2727 - DNA, 25 bp, Homo sapiens
gggcgacggcggcgaagggcggggg

SEQ ID NO: 2728 - DNA, 25 bp, Homo sapiens
cgacggcggcgaagggcgggggcgg

SEQ ID NO: 2729 - DNA, 25 bp, Homo sapiens
cggcggcgaagggcgggggcggagg

SEQ ID NO: 2730 - DNA, 25 bp, Homo sapiens
gggcgggggcggaggaggagcgagc

SEQ ID NO: 2731 - DNA, 25 bp, Homo sapiens
ggcgggggcggaggaggagcgagcc

SEQ ID NO: 2732 - DNA, 25 bp, Homo sapiens
ggggcggaggaggagcgagccgggc

SEQ ID NO: 2733 - DNA, 25 bp, Homo sapiens
gggcggaggaggagcgagccgggcc

SEQ ID NO: 2734 - DNA, 25 bp, Homo sapiens
ggcggaggaggagcgagccgggccg

SEQ ID NO: 2735 - DNA, 25 bp, Homo sapiens
gcggaggaggagcgagccgggccgg

SEQ ID NO: 2736 - DNA, 25 bp, Homo sapiens
cggaggaggagcgagccgggccggg

SEQ ID NO: 2737 - DNA, 25 bp, Homo sapiens
ggccggggggcagctgcacagtctc

SEQ ID NO: 2738 - DNA, 25 bp, Homo sapiens
gccggggggcagctgcacagtctcc

SEQ ID NO: 2739 - DNA, 25 bp, Homo sapiens
cagctgcacagtctccgggatcccc

SEQ ID NO: 2740 - DNA, 25 bp, Homo sapiens
gcacagtctccgggatccccaggcc

SEQ ID NO: 2741 - DNA, 25 bp, Homo sapiens
cagtctccgggatccccaggcctgg

SEQ ID NO: 2742 - DNA, 25 bp, Homo sapiens
agtctccgggatccccaggcctgga

SEQ ID NO: 2743 - DNA, 25 bp, Homo sapiens
gtctccgggatccccaggcctggag

SEQ ID NO: 2744 - DNA, 25 bp, Homo sapiens
tctccgggatccccaggcctggagg

SEQ ID NO: 2745 - DNA, 25 bp, Homo sapiens
ctccgggatccccaggcctggaggg

SEQ ID NO: 2746 - DNA, 25 bp, Homo sapiens
ccaggcctggaggggggtctgtgcg

SEQ ID NO: 2747 - DNA, 25 bp, Homo sapiens
gcctggaggggggtctgtgcgcggc

SEQ ID NO: 2748 - DNA, 25 bp, Homo sapiens
ggaggggggtctgtgcgcggccggc

SEQ ID NO: 2749 - DNA, 25 bp, Homo sapiens
cggccggctggctctgccccgcgtc

SEQ ID NO: 2750 - DNA, 25 bp, Homo sapiens
gctctgccccgcgtccggtcccgag

SEQ ID NO: 2751 - DNA, 25 bp, Homo sapiens
ctctgccccgcgtccggtcccgagc

SEQ ID NO: 2752 - DNA, 25 bp, Homo sapiens
cgtccggtcccgagcgggcctccct

SEQ ID NO: 2753 - DNA, 25 bp, Homo sapiens
gtccggtcccgagcgggcctccctc

SEQ ID NO: 2754 - DNA, 25 bp, Homo sapiens
gccagcccgatgtgaccgagcccag

SEQ ID NO: 2755 - DNA, 25 bp, Homo sapiens
gaccgagcccagcggagcctgagca

SEQ ID NO: 2756 - DNA, 25 bp, Homo sapiens
agcccagcggagcctgagcaaggag

SEQ ID NO: 2757 - DNA, 25 bp, Homo sapiens
gcccagcggagcctgagcaaggagc

SEQ ID NO: 2758 - DNA, 25 bp, Homo sapiens
gcctgagcaaggagcgggtccgtcg

SEQ ID NO: 2759 - DNA, 25 bp, Homo sapiens
gcaaggagcgggtccgtcgcggagc

SEQ ID NO: 2760 - DNA, 25 bp, Homo sapiens
aggagcgggtccgtcgcggagccgg

SEQ ID NO: 2761 - DNA, 25 bp, Homo sapiens
ggagcgggtccgtcgcggagccgga

SEQ ID NO: 2762 - DNA, 25 bp, Homo sapiens
gcgggtccgtcgcggagccggaggg

SEQ ID NO: 2763 - DNA, 25 bp, Homo sapiens
cgggtccgtcgcggagccggagggc

SEQ ID NO: 2764 - DNA, 25 bp, Homo sapiens
gtccgtcgcggagccggagggcggg

SEQ ID NO: 2765 - DNA, 25 bp, Homo sapiens
ggagggcgggaggaacatgacatcg

SEQ ID NO: 2766 - DNA, 25 bp, Homo sapiens
gggcgggaggaacatgacatcgcgg

SEQ ID NO: 2767 - DNA, 25 bp, Homo sapiens
ggaggaacatgacatcgcggaggtg

SEQ ID NO: 2768 - DNA, 25 bp, Homo sapiens
gacatcgcggaggtgaggagccccg

SEQ ID NO: 2769 - DNA, 25 bp, Homo sapiens
acatcgcggaggtgaggagccccga

SEQ ID NO: 2770 - DNA, 25 bp, Homo sapiens
catcgcggaggtgaggagccccgag

SEQ ID NO: 2771 - DNA, 25 bp, Homo sapiens
cttcctcctggaaaccgcggccgcc

SEQ ID NO: 2772 - DNA, 25 bp, Homo sapiens
catccttgcttcctcctggaaaccg

SEQ ID NO: 2773 - DNA, 25 bp, Homo sapiens
tgtccaaagcatccttgcttcctcc

SEQ ID NO: 2774 - DNA, 25 bp, Homo sapiens
gaatggcagcgcgggggctccgcgg

SEQ ID NO: 2775 - DNA, 25 bp, Homo sapiens
cgggaatggcagcgcgggggctccg

SEQ ID NO: 2776 - DNA, 25 bp, Homo sapiens
gcgacggccgggaatggcagcgcgg

SEQ ID NO: 2777 - DNA, 25 bp, Homo sapiens
agcgacggccgggaatggcagcgcg

SEQ ID NO: 2778 - DNA, 25 bp, Homo sapiens
gagcgacggccgggaatggcagcgc

SEQ ID NO: 2779 - DNA, 25 bp, Homo sapiens
cgagcgacggccgggaatggcagcg

SEQ ID NO: 2780 - DNA, 25 bp, Homo sapiens
cggaggaccgagcgacggccgggaa

SEQ ID NO: 2781 - DNA, 25 bp, Homo sapiens
gtcagcggaggaccgagcgacggcc

SEQ ID NO: 2782 - DNA, 25 bp, Homo sapiens
cgtcagcggaggaccgagcgacggc

SEQ ID NO: 2783 - DNA, 25 bp, Homo sapiens
ttcccgtcagcggaggaccgagcga

SEQ ID NO: 2784 - DNA, 25 bp, Homo sapiens
cggacttcctgcttcccgtcagcgg

SEQ ID NO: 2785 - DNA, 25 bp, Homo sapiens
cggcggacttcctgcttcccgtcag

SEQ ID NO: 2786 - DNA, 25 bp, Homo sapiens
gagactgtgcagctgcgggggccgg

SEQ ID NO: 2787 - DNA, 25 bp, Homo sapiens
tcccggagactgtgcagctgcgggg

SEQ ID NO: 2788 - DNA, 25 bp, Homo sapiens
gacccccctccaggcctggggatcc

SEQ ID NO: 2789 - DNA, 25 bp, Homo sapiens
gcgcacagacccccctccaggcctg

SEQ ID NO: 2790 - DNA, 25 bp, Homo sapiens
cgcgcacagacccccctccaggcct

SEQ ID NO: 2791 - DNA, 25 bp, Homo sapiens
ccgcgcacagacccccctccaggcc

SEQ ID NO: 2792 - DNA, 25 bp, Homo sapiens
gccggccgcgcacagacccccctcc

SEQ ID NO: 2793 - DNA, 25 bp, Homo sapiens
ggaccggacgcggggcagagccagc

SEQ ID NO: 2794 - DNA, 25 bp, Homo sapiens
ggaggcccgctcgggaccggacgcg

SEQ ID NO: 2795 - DNA, 25 bp, Homo sapiens
gggaggcccgctcgggaccggacgc

SEQ ID NO: 2796 - DNA, 25 bp, Homo sapiens
agggaggcccgctcgggaccggacg

SEQ ID NO: 2797 - DNA, 25 bp, Homo sapiens
ggcccgagggaggcccgctcgggac

SEQ ID NO: 2798 - DNA, 25 bp, Homo sapiens
gggctggcccgagggaggcccgctc

SEQ ID NO: 2799 - DNA, 25 bp, Homo sapiens
cgggctggcccgagggaggcccgct

SEQ ID NO: 2800 - DNA, 25 bp, Homo sapiens
cggtcacatcgggctggcccgaggg

SEQ ID NO: 2801 - DNA, 25 bp, Homo sapiens
gctcggtcacatcgggctggcccga

SEQ ID NO: 2802 - DNA, 25 bp, Homo sapiens
ggctcggtcacatcgggctggcccg

SEQ ID NO: 2803 - DNA, 25 bp, Homo sapiens
tccgctgggctcggtcacatcgggc

SEQ ID NO: 2804 - DNA, 25 bp, Homo sapiens
aggctccgctgggctcggtcacatc

SEQ ID NO: 2805 - DNA, 25 bp, Homo sapiens
caggctccgctgggctcggtcacat

SEQ ID NO: 2806 - DNA, 25 bp, Homo sapiens
ctccttgctcaggctccgctgggct

SEQ ID NO: 2807 - DNA, 25 bp, Homo sapiens
acccgctccttgctcaggctccgct

SEQ ID NO: 2808 - DNA, 25 bp, Homo sapiens
gacccgctccttgctcaggctccgc

SEQ ID NO: 2809 - DNA, 25 bp, Homo sapiens
tccgcgacggacccgctccttgctc

SEQ ID NO: 2810 - DNA, 25 bp, Homo sapiens
ttcctcccgccctccggctccgcga

SEQ ID NO: 2811 - DNA, 25 bp, Homo sapiens
gcgatgtcatgttcctcccgccctc

SEQ ID NO: 2812 - DNA, 25 bp, Homo sapiens
taagatggtttcacccaaatatcac

SEQ ID NO: 2813 - DNA, 25 bp, Homo sapiens
tggtttcacccaaatatcactggtg

SEQ ID NO: 2814 - DNA, 25 bp, Homo sapiens
tttcacccaaatatcactggtgtgg

SEQ ID NO: 2815 - DNA, 25 bp, Homo sapiens
aggcagaaaacctactgttgacaag

SEQ ID NO: 2816 - DNA, 25 bp, Homo sapiens
acctactgttgacaagaggagttga

SEQ ID NO: 2817 - DNA, 25 bp, Homo sapiens
acaagaggagttgatggcagttttt

SEQ ID NO: 2818 - DNA, 25 bp, Homo sapiens
aggagttgatggcagttttttggca

SEQ ID NO: 2819 - DNA, 25 bp, Homo sapiens
tggcaaggcctagtaaaagtaaccc

SEQ ID NO: 2820 - DNA, 25 bp, Homo sapiens
ccctggagacttcacactttccgtt

SEQ ID NO: 2821 - DNA, 25 bp, Homo sapiens
acttcacactttccgttaggtaagt

SEQ ID NO: 2822 - DNA, 25 bp, Homo sapiens
ttctgcctccacaccagtgatattt

SEQ ID NO: 2823 - DNA, 25 bp, Homo sapiens
tttctgcctccacaccagtgatatt

SEQ ID NO: 2824 - DNA, 25 bp, Homo sapiens
gccatcaactcctcttgtcaacagt

SEQ ID NO: 2825 - DNA, 25 bp, Homo sapiens
tgaagtctccagggttacttttact

SEQ ID NO: 2826 - DNA, 25 bp, Homo sapiens
cctaacggaaagtgtgaagtctcca

SEQ ID NO: 2827 - DNA, 25 bp, Homo sapiens
acctaacggaaagtgtgaagtctcc

SEQ ID NO: 2828 - DNA, 25 bp, Homo sapiens
ttccaatggactattttagaagaaa

SEQ ID NO: 2829 - DNA, 25 bp, Homo sapiens
tcacccacatcaagattcagaacac

SEQ ID NO: 2830 - DNA, 25 bp, Homo sapiens
acactggtgattactatgacctgta

SEQ ID NO: 2831 - DNA, 25 bp, Homo sapiens
ctggtgattactatgacctgtatgg

SEQ ID NO: 2832 - DNA, 25 bp, Homo sapiens
tggtgattactatgacctgtatgga

SEQ ID NO: 2833 - DNA, 25 bp, Homo sapiens
ggtgattactatgacctgtatggag

SEQ ID NO: 2834 - DNA, 25 bp, Homo sapiens
tatggaggggagaaatttgccactt

SEQ ID NO: 2835 - DNA, 25 bp, Homo sapiens
gagaaatttgccactttggctgagt

SEQ ID NO: 2836 - DNA, 25 bp, Homo sapiens
ttggctgagttggtccagtattaca

SEQ ID NO: 2837 - DNA, 25 bp, Homo sapiens
tggtccagtattacatggaacatca

SEQ ID NO: 2838 - DNA, 25 bp, Homo sapiens
ggtccagtattacatggaacatcac

SEQ ID NO: 2839 - DNA, 25 bp, Homo sapiens
atcacgggcaattaaaagagaagaa

SEQ ID NO: 2840 - DNA, 25 bp, Homo sapiens
gaactgtgcagatcctacctctgaa

SEQ ID NO: 2841 - DNA, 25 bp, Homo sapiens
ctccatttcttctaaaatagtccat

SEQ ID NO: 2842 - DNA, 25 bp, Homo sapiens
tcaccagtgttctgaatcttgatgt

SEQ ID NO: 2843 - DNA, 25 bp, Homo sapiens
atcaccagtgttctgaatcttgatg

SEQ ID NO: 2844 - DNA, 25 bp, Homo sapiens
agtggcaaatttctcccctccatac

SEQ ID NO: 2845 - DNA, 25 bp, Homo sapiens
taatactggaccaactcagccaaag

SEQ ID NO: 2846 - DNA, 25 bp, Homo sapiens
ttgcccgtgatgttccatgtaatac

SEQ ID NO: 2847 - DNA, 25 bp, Homo sapiens
cagaggtaggatctgcacagttcag

SEQ ID NO: 2848 - DNA, 25 bp, Homo sapiens
aaaatgttactgacctttcagaggt

SEQ ID NO: 2849 - DNA, 25 bp, Homo sapiens
cactaaaatgttactgacctttcag

SEQ ID NO: 2850 - DNA, 25 bp, Homo sapiens
tttttaaaaactttaggtggtttca

SEQ ID NO: 2851 - DNA, 25 bp, Homo sapiens
ttaggtggtttcatggacatctctc

SEQ ID NO: 2852 - DNA, 25 bp, Homo sapiens
taggtggtttcatggacatctctct

SEQ ID NO: 2853 - DNA, 25 bp, Homo sapiens
aagcagagaaattattaactgaaaa

SEQ ID NO: 2854 - DNA, 25 bp, Homo sapiens
aattattaactgaaaaaggaaaaca

SEQ ID NO: 2855 - DNA, 25 bp, Homo sapiens
ttgtacgagagagccagagccaccc

SEQ ID NO: 2856 - DNA, 25 bp, Homo sapiens
gagattttgttctttctgtgcgcac

SEQ ID NO: 2857 - DNA, 25 bp, Homo sapiens
tttctgtgcgcactggtgatgacaa

SEQ ID NO: 2858 - DNA, 25 bp, Homo sapiens
ttctgtgcgcactggtgatgacaaa

SEQ ID NO: 2859 - DNA, 25 bp, Homo sapiens
tctgtgcgcactggtgatgacaaag

SEQ ID NO: 2860 - DNA, 25 bp, Homo sapiens
gtgatgacaaaggggagagcaatga

SEQ ID NO: 2861 - DNA, 25 bp, Homo sapiens
gtgacccatgttatgattcgctgtc

SEQ ID NO: 2862 - DNA, 25 bp, Homo sapiens
aagaacaaaatctccagggtggctc

SEQ ID NO: 2863 - DNA, 25 bp, Homo sapiens
cacagaaagaacaaaatctccaggg

SEQ ID NO: 2864 - DNA, 25 bp, Homo sapiens
gcgcacagaaagaacaaaatctcca

SEQ ID NO: 2865 - DNA, 25 bp, Homo sapiens
tgcgcacagaaagaacaaaatctcc

SEQ ID NO: 2866 - DNA, 25 bp, Homo sapiens
tttacctgacagcgaatcataacat

SEQ ID NO: 2867 - DNA, 25 bp, Homo sapiens
atttacctgacagcgaatcataaca

SEQ ID NO: 2868 - DNA, 25 bp, Homo sapiens
cttgaaaggaactgaaatacgacgt

SEQ ID NO: 2869 - DNA, 25 bp, Homo sapiens
gaaaggaactgaaatacgacgttgg

SEQ ID NO: 2870 - DNA, 25 bp, Homo sapiens
aggaactgaaatacgacgttggtgg

SEQ ID NO: 2871 - DNA, 25 bp, Homo sapiens
gaaatacgacgttggtggaggagaa

SEQ ID NO: 2872 - DNA, 25 bp, Homo sapiens
cggtttgattctttgacagatcttg

SEQ ID NO: 2873 - DNA, 25 bp, Homo sapiens
gtggaacattataagaagaatccta

SEQ ID NO: 2874 - DNA, 25 bp, Homo sapiens
gaacattataagaagaatcctatgg

SEQ ID NO: 2875 - DNA, 25 bp, Homo sapiens
aagaagaatcctatggtggaaacat

SEQ ID NO: 2876 - DNA, 25 bp, Homo sapiens
agaagaatcctatggtggaaacatt

SEQ ID NO: 2877 - DNA, 25 bp, Homo sapiens
ttgggtacagtactacaactcaagc

SEQ ID NO: 2878 - DNA, 25 bp, Homo sapiens
ctacaactcaagcaggtgagcagat

SEQ ID NO: 2879 - DNA, 25 bp, Homo sapiens
gtactgtacccaatgtttccaccat

SEQ ID NO: 2880 - DNA, 25 bp, Homo sapiens
ctgagaccacagataaagtcaaaca

SEQ ID NO: 2881 - DNA, 25 bp, Homo sapiens
cacagataaagtcaaacaaggcttt

SEQ ID NO: 2882 - DNA, 25 bp, Homo sapiens
acagataaagtcaaacaaggctttt

SEQ ID NO: 2883 - DNA, 25 bp, Homo sapiens
aaacaaggcttttgggaagaatttg

SEQ ID NO: 2884 - DNA, 25 bp, Homo sapiens
cagcatttatacgagtcgtgttaag

SEQ ID NO: 2885 - DNA, 25 bp, Homo sapiens
gcagcatttatacgagtcgtgttaa

SEQ ID NO: 2886 - DNA, 25 bp, Homo sapiens
agcagcatttatacgagtcgtgtta

SEQ ID NO: 2887 - DNA, 25 bp, Homo sapiens
caaaagccttgtttgactttatctg

SEQ ID NO: 2888 - DNA, 25 bp, Homo sapiens
ctttctttccagacactacaacaac

SEQ ID NO: 2889 - DNA, 25 bp, Homo sapiens
tgcaaacttctctacagccgaaaag

SEQ ID NO: 2890 - DNA, 25 bp, Homo sapiens
gcaaacttctctacagccgaaaaga

SEQ ID NO: 2891 - DNA, 25 bp, Homo sapiens
tctctacagccgaaaagagggtcaa

SEQ ID NO: 2892 - DNA, 25 bp, Homo sapiens
tttgcactcctgttgttgtagtgtc

SEQ ID NO: 2893 - DNA, 25 bp, Homo sapiens
gttttcttgcctttgaccctctttt

SEQ ID NO: 2894 - DNA, 25 bp, Homo sapiens
agcggaatattgatacttacagggc

SEQ ID NO: 2895 - DNA, 25 bp, Homo sapiens
tctttttcttctagttgatcatacc

SEQ ID NO: 2896 - DNA, 25 bp, Homo sapiens
ctttttcttctagttgatcatacca

SEQ ID NO: 2897 - DNA, 25 bp, Homo sapiens
atcataccagggttgtcctacacga

SEQ ID NO: 2898 - DNA, 25 bp, Homo sapiens
gattacatcaatgcaaatatcatca

SEQ ID NO: 2899 - DNA, 25 bp, Homo sapiens
ggatcaccatcgtgtaggacaaccc

SEQ ID NO: 2900 - DNA, 25 bp, Homo sapiens
aggctcattgggatcaccatcgtgt

SEQ ID NO: 2901 - DNA, 25 bp, Homo sapiens
tgatgtaatctgaaacaggctcatt

SEQ ID NO: 2902 - DNA, 25 bp, Homo sapiens
ttgatgtaatctgaaacaggctcat

SEQ ID NO: 2903 - DNA, 25 bp, Homo sapiens
tatttgcattgatgtaatctgaaac

SEQ ID NO: 2904 - DNA, 25 bp, Homo sapiens
ccaaaaagagttacattgccacaca

SEQ ID NO: 2905 - DNA, 25 bp, Homo sapiens
gccacacaaggctgcctgcaaaaca

SEQ ID NO: 2906 - DNA, 25 bp, Homo sapiens
cctgcaaaacacggtgaatgacttt

SEQ ID NO: 2907 - DNA, 25 bp, Homo sapiens
gcaaaacacggtgaatgacttttgg

SEQ ID NO: 2908 - DNA, 25 bp, Homo sapiens
aacacggtgaatgacttttggcgga

SEQ ID NO: 2909 - DNA, 25 bp, Homo sapiens
gtgattgtcatgacaacgaaagaag

SEQ ID NO: 2910 - DNA, 25 bp, Homo sapiens
tcatgacaacgaaagaagtggagag

SEQ ID NO: 2911 - DNA, 25 bp, Homo sapiens
acaacgaaagaagtggagagaggaa

SEQ ID NO: 2912 - DNA, 25 bp, Homo sapiens
ggtttcaaattcaggctagaaattt

SEQ ID NO: 2913 - DNA, 25 bp, Homo sapiens
aattgttgcacttggtttcaaattc

SEQ ID NO: 2914 - DNA, 25 bp, Homo sapiens
tttttgggctttgaattgttgcact

SEQ ID NO: 2915 - DNA, 25 bp, Homo sapiens
cttgtgtggcaatgtaactcttttt

SEQ ID NO: 2916 - DNA, 25 bp, Homo sapiens
ccttgtgtggcaatgtaactctttt

SEQ ID NO: 2917 - DNA, 25 bp, Homo sapiens
accgtgttttgcaggcagccttgtg

SEQ ID NO: 2918 - DNA, 25 bp, Homo sapiens
ccaaaagtcattcaccgtgttttgc

SEQ ID NO: 2919 - DNA, 25 bp, Homo sapiens
catgacaatcactcgggagttttct

SEQ ID NO: 2920 - DNA, 25 bp, Homo sapiens
tctttcgttgtcatgacaatcactc

SEQ ID NO: 2921 - DNA, 25 bp, Homo sapiens
ttctttcgttgtcatgacaatcact

SEQ ID NO: 2922 - DNA, 25 bp, Homo sapiens
cttccagagtaaatgtgtcaaatac

SEQ ID NO: 2923 - DNA, 25 bp, Homo sapiens
ctgatgagtatgctctaaaagaata

SEQ ID NO: 2924 - DNA, 25 bp, Homo sapiens
aaaagaatatggcgtcatgcgtgtt

SEQ ID NO: 2925 - DNA, 25 bp, Homo sapiens
acgctaagagaacttaaactttcaa

SEQ ID NO: 2926 - DNA, 25 bp, Homo sapiens
taagagaacttaaactttcaaaggt

SEQ ID NO: 2927 - DNA, 25 bp, Homo sapiens
aggccagtatttgacacatttactc

SEQ ID NO: 2928 - DNA, 25 bp, Homo sapiens
catattcttttagagcatactcatc

SEQ ID NO: 2929 - DNA, 25 bp, Homo sapiens
agttctcttagcgtatagtcatgag

SEQ ID NO: 2930 - DNA, 25 bp, Homo sapiens
ttcttggctctactccaggggaata

SEQ ID NO: 2931 - DNA, 25 bp, Homo sapiens
ctactccaggggaatacggagagaa

SEQ ID NO: 2932 - DNA, 25 bp, Homo sapiens
ccaggggaatacggagagaacggtc

SEQ ID NO: 2933 - DNA, 25 bp, Homo sapiens
gagaacggtctggcaataccacttt

SEQ ID NO: 2934 - DNA, 25 bp, Homo sapiens
ggtctggcaataccactttcggacc

SEQ ID NO: 2935 - DNA, 25 bp, Homo sapiens
tggcaataccactttcggacctggc

SEQ ID NO: 2936 - DNA, 25 bp, Homo sapiens
accactttcggacctggccggacca

SEQ ID NO: 2937 - DNA, 25 bp, Homo sapiens
cggaccacggcgtgcccagcgaccc

SEQ ID NO: 2938 - DNA, 25 bp, Homo sapiens
ggaccacggcgtgcccagcgaccct

SEQ ID NO: 2939 - DNA, 25 bp, Homo sapiens
gaccacggcgtgcccagcgaccctg

SEQ ID NO: 2940 - DNA, 25 bp, Homo sapiens
accacggcgtgcccagcgaccctgg

SEQ ID NO: 2941 - DNA, 25 bp, Homo sapiens
gtgcccagcgaccctgggggcgtgc

SEQ ID NO: 2942 - DNA, 25 bp, Homo sapiens
gaccctgggggcgtgctggacttcc

SEQ ID NO: 2943 - DNA, 25 bp, Homo sapiens
cctgggggcgtgctggacttcctgg

SEQ ID NO: 2944 - DNA, 25 bp, Homo sapiens
gggggcgtgctggacttcctggagg

SEQ ID NO: 2945 - DNA, 25 bp, Homo sapiens
ttcctggaggaggtgcaccataagc

SEQ ID NO: 2946 - DNA, 25 bp, Homo sapiens
gtgcaccataagcaggagagcatca

SEQ ID NO: 2947 - DNA, 25 bp, Homo sapiens
ataagcaggagagcatcatggatgc

SEQ ID NO: 2948 - DNA, 25 bp, Homo sapiens
taagcaggagagcatcatggatgca

SEQ ID NO: 2949 - DNA, 25 bp, Homo sapiens
caggagagcatcatggatgcagggc

SEQ ID NO: 2950 - DNA, 25 bp, Homo sapiens
agcatcatggatgcagggccggtcg

SEQ ID NO: 2951 - DNA, 25 bp, Homo sapiens
tgcagggccggtcgtggtgcactgc

SEQ ID NO: 2952 - DNA, 25 bp, Homo sapiens
aggtgacagctcctgctgcccctct

SEQ ID NO: 2953 - DNA, 25 bp, Homo sapiens
agcctgtccctgtctcctagcgccc

SEQ ID NO: 2954 - DNA, 25 bp, Homo sapiens
gcctgtccctgtctcctagcgccca

SEQ ID NO: 2955 - DNA, 25 bp, Homo sapiens
tacccactcctagctctttaactgt

SEQ ID NO: 2956 - DNA, 25 bp, Homo sapiens
gtaggaagaatttaatatctgtttg

SEQ ID NO: 2957 - DNA, 25 bp, Homo sapiens
tttgaggcatagagcaactgcattg

SEQ ID NO: 2958 - DNA, 25 bp, Homo sapiens
ttgaggcatagagcaactgcattga

SEQ ID NO: 2959 - DNA, 25 bp, Homo sapiens
tgcattgagggacattttgatccca

SEQ ID NO: 2960 - DNA, 25 bp, Homo sapiens
ctcctagaccctacagcactgccat

SEQ ID NO: 2961 - DNA, 25 bp, Homo sapiens
gaccctacagcactgccattggcca

SEQ ID NO: 2962 - DNA, 25 bp, Homo sapiens
acagcactgccattggccatggcca

SEQ ID NO: 2963 - DNA, 25 bp, Homo sapiens
agttgtgcattaaacaacttcatcc

SEQ ID NO: 2964 - DNA, 25 bp, Homo sapiens
ccagaccgttctctccgtattcccc

SEQ ID NO: 2965 - DNA, 25 bp, Homo sapiens
gccgtggtccggccaggtccgaaag

SEQ ID NO: 2966 - DNA, 25 bp, Homo sapiens
tcgctgggcacgccgtggtccggcc

SEQ ID NO: 2967 - DNA, 25 bp, Homo sapiens
cagggtcgctgggcacgccgtggtc

SEQ ID NO: 2968 - DNA, 25 bp, Homo sapiens
gcccccagggtcgctgggcacgccg

SEQ ID NO: 2969 - DNA, 25 bp, Homo sapiens
agtccagcacgcccccagggtcgct

SEQ ID NO: 2970 - DNA, 25 bp, Homo sapiens
aagtccagcacgcccccagggtcgc

SEQ ID NO: 2971 - DNA, 25 bp, Homo sapiens
ctccaggaagtccagcacgccccca

SEQ ID NO: 2972 - DNA, 25 bp, Homo sapiens
cctccaggaagtccagcacgccccc

SEQ ID NO: 2973 - DNA, 25 bp, Homo sapiens
ctcctgcttatggtgcacctcctcc

SEQ ID NO: 2974 - DNA, 25 bp, Homo sapiens
tgcatccatgatgctctcctgctta

SEQ ID NO: 2975 - DNA, 25 bp, Homo sapiens
gctgtcacctgcagtgcaccacgac

SEQ ID NO: 2976 - DNA, 25 bp, Homo sapiens
acaggctgtggcctagaggggcagc

SEQ ID NO: 2977 - DNA, 25 bp, Homo sapiens
gacagggacaggctgtggcctagag

SEQ ID NO: 2978 - DNA, 25 bp, Homo sapiens
agacagggacaggctgtggcctaga

SEQ ID NO: 2979 - DNA, 25 bp, Homo sapiens
gagacagggacaggctgtggcctag

SEQ ID NO: 2980 - DNA, 25 bp, Homo sapiens
ggcgctaggagacagggacaggctg

SEQ ID NO: 2981 - DNA, 25 bp, Homo sapiens
gccctgggcgctaggagacagggac

SEQ ID NO: 2982 - DNA, 25 bp, Homo sapiens
agcaagccctgggcgctaggagaca

SEQ ID NO: 2983 - DNA, 25 bp, Homo sapiens
aagcaagccctgggcgctaggagac

SEQ ID NO: 2984 - DNA, 25 bp, Homo sapiens
taggtaaaagcaagccctgggcgct

SEQ ID NO: 2985 - DNA, 25 bp, Homo sapiens
gagtgggtaggtaaaagcaagccct

SEQ ID NO: 2986 - DNA, 25 bp, Homo sapiens
ggagtgggtaggtaaaagcaagccc

SEQ ID NO: 2987 - DNA, 25 bp, Homo sapiens
tacagttaaagagctaggagtgggt

SEQ ID NO: 2988 - DNA, 25 bp, Homo sapiens
ttcctacagttaaagagctaggagt

SEQ ID NO: 2989 - DNA, 25 bp, Homo sapiens
cttcctacagttaaagagctaggag

SEQ ID NO: 2990 - DNA, 25 bp, Homo sapiens
aaattcttcctacagttaaagagct

SEQ ID NO: 2991 - DNA, 25 bp, Homo sapiens
gtagggtctaggagaaatatgcctt

SEQ ID NO: 2992 - DNA, 25 bp, Homo sapiens
tgtagggtctaggagaaatatgcct

SEQ ID NO: 2993 - DNA, 25 bp, Homo sapiens
ggccaatggcagtgctgtagggtct

SEQ ID NO: 2994 - DNA, 25 bp, Homo sapiens
ggccatggccaatggcagtgctgta

SEQ ID NO: 2995 - DNA, 25 bp, Homo sapiens
tggccatggccaatggcagtgctgt

SEQ ID NO: 2996 - DNA, 25 bp, Homo sapiens
agcatgttgccatggccatggccaa

SEQ ID NO: 2997 - DNA, 25 bp, Homo sapiens
ttaactgagcatgttgccatggcca

SEQ ID NO: 2998 - DNA, 25 bp, Homo sapiens
gctgttttaactgagcatgttgcca

SEQ ID NO: 2999 - DNA, 25 bp, Homo sapiens
aagttgtttaatgcacaacttctgg

SEQ ID NO: 3000 - DNA, 25 bp, Homo sapiens
atgaagttgtttaatgcacaacttc

SEQ ID NO: 3001 - DNA, 25 bp, Homo sapiens
gtccttctgcccgcagtgctggaat

SEQ ID NO: 3002 - DNA, 25 bp, Homo sapiens
ttctgcccgcagtgctggaattggc

SEQ ID NO: 3003 - DNA, 25 bp, Homo sapiens
cccgcagtgctggaattggccggac

SEQ ID NO: 3004 - DNA, 25 bp, Homo sapiens
ccgcagtgctggaattggccggaca

SEQ ID NO: 3005 - DNA, 25 bp, Homo sapiens
ttcttattgacatcatcagagagaa

SEQ ID NO: 3006 - DNA, 25 bp, Homo sapiens
ttattgacatcatcagagagaaagg

SEQ ID NO: 3007 - DNA, 25 bp, Homo sapiens
tattgacatcatcagagagaaaggt

SEQ ID NO: 3008 - DNA, 25 bp, Homo sapiens
tcatcagagagaaaggtgggtcatc

SEQ ID NO: 3009 - DNA, 25 bp, Homo sapiens
tcagagagaaaggtgggtcatctgg

SEQ ID NO: 3010 - DNA, 25 bp, Homo sapiens
cagagagaaaggtgggtcatctggt

SEQ ID NO: 3011 - DNA, 25 bp, Homo sapiens
ggccaattccagcactgcgggcaga

SEQ ID NO: 3012 - DNA, 25 bp, Homo sapiens
cctgtccggccaattccagcactgc

SEQ ID NO: 3013 - DNA, 25 bp, Homo sapiens
ccctgtccggccaattccagcactg

SEQ ID NO: 3014 - DNA, 25 bp, Homo sapiens
atcaatcacaatgaacgtccctgtc

SEQ ID NO: 3015 - DNA, 25 bp, Homo sapiens
attgacgttcccaaaaccatccaga

SEQ ID NO: 3016 - DNA, 25 bp, Homo sapiens
cgttcccaaaaccatccagatggtg

SEQ ID NO: 3017 - DNA, 25 bp, Homo sapiens
aaccatccagatggtgcggtctcag

SEQ ID NO: 3018 - DNA, 25 bp, Homo sapiens
tccagatggtgcggtctcagaggtc

SEQ ID NO: 3019 - DNA, 25 bp, Homo sapiens
ccagatggtgcggtctcagaggtca

SEQ ID NO: 3020 - DNA, 25 bp, Homo sapiens
atggtgcggtctcagaggtcaggga

SEQ ID NO: 3021 - DNA, 25 bp, Homo sapiens
gaagcacagtaccgatttatctata

SEQ ID NO: 3022 - DNA, 25 bp, Homo sapiens
gcacagtaccgatttatctatatgg

SEQ ID NO: 3023 - DNA, 25 bp, Homo sapiens
gcattatattgaaacactacagcgc

SEQ ID NO: 3024 - DNA, 25 bp, Homo sapiens
ctacagcgcaggattgaagaagagc

SEQ ID NO: 3025 - DNA, 25 bp, Homo sapiens
ttgaagaagagcaggtaccagcctg

SEQ ID NO: 3026 - DNA, 25 bp, Homo sapiens
tgaagaagagcaggtaccagcctga

SEQ ID NO: 3027 - DNA, 25 bp, Homo sapiens
gaagagcaggtaccagcctgagggc

SEQ ID NO: 3028 - DNA, 25 bp, Homo sapiens
tcaatatcgcagtcaacacctacga

SEQ ID NO: 3029 - DNA, 25 bp, Homo sapiens
gagaccgcaccatctggatggtttt

SEQ ID NO: 3030 - DNA, 25 bp, Homo sapiens
tgagaccgcaccatctggatggttt

SEQ ID NO: 3031 - DNA, 25 bp, Homo sapiens
gacctctgagaccgcaccatctgga

SEQ ID NO: 3032 - DNA, 25 bp, Homo sapiens
ccctgacctctgagaccgcaccatc

SEQ ID NO: 3033 - DNA, 25 bp, Homo sapiens
gataaatcggtactgtgcttctgtc

SEQ ID NO: 3034 - DNA, 25 bp, Homo sapiens
atgctggaccgccatatagataaat

SEQ ID NO: 3035 - DNA, 25 bp, Homo sapiens
gcgctgtagtgtttcaatataatgc

SEQ ID NO: 3036 - DNA, 25 bp, Homo sapiens
ctcttccaaatttcagaaaagcaag

SEQ ID NO: 3037 - DNA, 25 bp, Homo sapiens
ccaaatttcagaaaagcaagaggaa

SEQ ID NO: 3038 - DNA, 25 bp, Homo sapiens
caaatttcagaaaagcaagaggaaa

SEQ ID NO: 3039 - DNA, 25 bp, Homo sapiens
tatacaaatattaagtattctctag

SEQ ID NO: 3040 - DNA, 25 bp, Homo sapiens
agtattctctagcggaccagacgag

SEQ ID NO: 3041 - DNA, 25 bp, Homo sapiens
ccctgtgcagagtaagtagtgctga

SEQ ID NO: 3042 - DNA, 25 bp, Homo sapiens
cctttcctcttgcttttctgaaatt

SEQ ID NO: 3043 - DNA, 25 bp, Homo sapiens
gagagggctctgatctccactcgtc

SEQ ID NO: 3044 - DNA, 25 bp, Homo sapiens
tggcgttggagtacaaggcgggaga

SEQ ID NO: 3045 - DNA, 25 bp, Homo sapiens
gtggcgttggagtacaaggcgggag

SEQ ID NO: 3046 - DNA, 25 bp, Homo sapiens
acagggtggcgttggagtacaaggc

SEQ ID NO: 3047 - DNA, 25 bp, Homo sapiens
cacagggtggcgttggagtacaagg

SEQ ID NO: 3048 - DNA, 25 bp, Homo sapiens
ctgcacagggtggcgttggagtaca

SEQ ID NO: 3049 - DNA, 25 bp, Homo sapiens
ctacttactctgcacagggtggcgt

SEQ ID NO: 3050 - DNA, 25 bp, Homo sapiens
tcagcactacttactctgcacaggg

SEQ ID NO: 3051 - DNA, 25 bp, Homo sapiens
ccttcagcactacttactctgcaca

SEQ ID NO: 3052 - DNA, 25 bp, Homo sapiens
tccttcagcactacttactctgcac

SEQ ID NO: 3053 - DNA, 25 bp, Homo sapiens
gacagtgctagagtctatgaaaacg

SEQ ID NO: 3054 - DNA, 25 bp, Homo sapiens
acagtgctagagtctatgaaaacgt

SEQ ID NO: 3055 - DNA, 25 bp, Homo sapiens
cctgccaaaacttcagcacagaaat

SEQ ID NO: 3056 - DNA, 25 bp, Homo sapiens
actctagcactgtcttctctcattc

SEQ ID NO: 3057 - DNA, 25 bp, Homo sapiens
tctgaaacttttctgctgttgcatc

SEQ ID NO: 3058 - DNA, 25 bp, Homo sapiens
cctatttctgtgctgaagttttggc

SEQ ID NO: 3059 - DNA, 25 bp, Homo sapiens
aatacctatttctgtgctgaagttt

SEQ ID NO: 3060 - DNA, 25 bp, Homo sapiens
agaaagtttatgtgaagacagaatt

SEQ ID NO: 3061 - DNA, 25 bp, Homo sapiens
tttatgtgaagacagaatttggatt

SEQ ID NO: 3062 - DNA, 25 bp, Homo sapiens
tgtgaagacagaatttggatttgga

SEQ ID NO: 3063 - DNA, 25 bp, Homo sapiens
atttggatttggaaggcttgcaatg

SEQ ID NO: 3064 - DNA, 25 bp, Homo sapiens
attttatagaatttgtttgaaattg

SEQ ID NO: 3065 - DNA, 25 bp, Homo sapiens
attgtgcgctgtattttgcagatta

SEQ ID NO: 3066 - DNA, 25 bp, Homo sapiens
ttgtgcgctgtattttgcagattat

SEQ ID NO: 3067 - DNA, 25 bp, Homo sapiens
tgtgcgctgtattttgcagattatg

SEQ ID NO: 3068 - DNA, 25 bp, Homo sapiens
ttatggggattcaaattctagtaat

SEQ ID NO: 3069 - DNA, 25 bp, Homo sapiens
gtttaattttttttttcctcattgt

SEQ ID NO: 3070 - DNA, 25 bp, Homo sapiens
tttaattttttttttcctcattgtt

SEQ ID NO: 3071 - DNA, 25 bp, Homo sapiens
ttaattttttttttcctcattgttg

SEQ ID NO: 3072 - DNA, 25 bp, Homo sapiens
ttggggatgatgagaagaaatgatt

SEQ ID NO: 3073 - DNA, 25 bp, Homo sapiens
tggggatgatgagaagaaatgattt

SEQ ID NO: 3074 - DNA, 25 bp, Homo sapiens
tcatttaccatcatgtatccagtag

SEQ ID NO: 3075 - DNA, 25 bp, Homo sapiens
tccagtagtggataattcattttga

SEQ ID NO: 3076 - DNA, 25 bp, Homo sapiens
aattcattttgatggcttctatttt

SEQ ID NO: 3077 - DNA, 25 bp, Homo sapiens
gactgtcagaagttgacctttgcac

SEQ ID NO: 3078 - DNA, 25 bp, Homo sapiens
ttaaagagtcatagaaaaagaatca

SEQ ID NO: 3079 - DNA, 25 bp, Homo sapiens
aagaatcatggatatttatgaatta

SEQ ID NO: 3080 - DNA, 25 bp, Homo sapiens
atggatatttatgaattaaggtaag

SEQ ID NO: 3081 - DNA, 25 bp, Homo sapiens
tatttatgaattaaggtaagaggtg

SEQ ID NO: 3082 - DNA, 25 bp, Homo sapiens
ttccagccgttgaccaattatagtt

SEQ ID NO: 3083 - DNA, 25 bp, Homo sapiens
gttcggctgttgactgagaagtttg

SEQ ID NO: 3084 - DNA, 25 bp, Homo sapiens
cggctgttgactgagaagtttgtgg

SEQ ID NO: 3085 - DNA, 25 bp, Homo sapiens
ggctgttgactgagaagtttgtggt

SEQ ID NO: 3086 - DNA, 25 bp, Homo sapiens
aataattgtcttgtacttagaaaaa

SEQ ID NO: 3087 - DNA, 25 bp, Homo sapiens
ggcgtctatgaatgaccagtgtttt

SEQ ID NO: 3088 - DNA, 25 bp, Homo sapiens
tgacaaacttatcccaaaactttag

SEQ ID NO: 3089 - DNA, 25 bp, Homo sapiens
cccccaactgttagtcaatctgagc

SEQ ID NO: 3090 - DNA, 25 bp, Homo sapiens
ccccaactgttagtcaatctgagct

SEQ ID NO: 3091 - DNA, 25 bp, Homo sapiens
ttagtcaatctgagctgggctcagc

SEQ ID NO: 3092 - DNA, 25 bp, Homo sapiens
tagtcaatctgagctgggctcagct

SEQ ID NO: 3093 - DNA, 25 bp, Homo sapiens
ctgggctgttcttctgccagcctgc

SEQ ID NO: 3094 - DNA, 25 bp, Homo sapiens
ggctgttcttctgccagcctgcagg

SEQ ID NO: 3095 - DNA, 25 bp, Homo sapiens
gccagcctgcaggtggccactcatg

SEQ ID NO: 3096 - DNA, 25 bp, Homo sapiens
gcaggtggccactcatgtggtcagc

SEQ ID NO: 3097 - DNA, 25 bp, Homo sapiens
gtggccactcatgtggtcagcaggt

SEQ ID NO: 3098 - DNA, 25 bp, Homo sapiens
gccactcatgtggtcagcaggtcgg

SEQ ID NO: 3099 - DNA, 25 bp, Homo sapiens
gtggtcagcaggtcggcggagagac

SEQ ID NO: 3100 - DNA, 25 bp, Homo sapiens
tggtcagcaggtcggcggagagact

SEQ ID NO: 3101 - DNA, 25 bp, Homo sapiens
cagcaggtcggcggagagactggga

SEQ ID NO: 3102 - DNA, 25 bp, Homo sapiens
aggtcggcggagagactgggatggc

SEQ ID NO: 3103 - DNA, 25 bp, Homo sapiens
ggtcggcggagagactgggatggct

SEQ ID NO: 3104 - DNA, 25 bp, Homo sapiens
tccttcttcgtgtagtctctttcag

SEQ ID NO: 3105 - DNA, 25 bp, Homo sapiens
cttcgtgtagtctctttcagtggcc

SEQ ID NO: 3106 - DNA, 25 bp, Homo sapiens
gtgtagtctctttcagtggcctggc

SEQ ID NO: 3107 - DNA, 25 bp, Homo sapiens
agtctctttcagtggcctggctggc

SEQ ID NO: 3108 - DNA, 25 bp, Homo sapiens
gtctctttcagtggcctggctggca

SEQ ID NO: 3109 - DNA, 25 bp, Homo sapiens
gctcccaagagctcaaaagcagaaa

SEQ ID NO: 3110 - DNA, 25 bp, Homo sapiens
caagagctcaaaagcagaaatggcc

SEQ ID NO: 3111 - DNA, 25 bp, Homo sapiens
atgatgatgatgatgatgatgatga

SEQ ID NO: 3112 - DNA, 25 bp, Homo sapiens
tggttttttctaatcagaagaaagc

SEQ ID NO: 3113 - DNA, 25 bp, Homo sapiens
ggttttttctaatcagaagaaagct

SEQ ID NO: 3114 - DNA, 25 bp, Homo sapiens
gttttttctaatcagaagaaagctg

SEQ ID NO: 3115 - DNA, 25 bp, Homo sapiens
acaagcccagctcagattcaagaaa

SEQ ID NO: 3116 - DNA, 25 bp, Homo sapiens
caagcccagctcagattcaagaaaa

SEQ ID NO: 3117 - DNA, 25 bp, Homo sapiens
gattcaagaaaagggtgtgaagtag

SEQ ID NO: 3118 - DNA, 25 bp, Homo sapiens
ggtgtgaagtagaggtgcagttaag

SEQ ID NO: 3119 - DNA, 25 bp, Homo sapiens
gtgtgaagtagaggtgcagttaagt

SEQ ID NO: 3120 - DNA, 25 bp, Homo sapiens
tgtgaagtagaggtgcagttaagtg

SEQ ID NO: 3121 - DNA, 25 bp, Homo sapiens
gtgaagtagaggtgcagttaagtgg

SEQ ID NO: 3122 - DNA, 25 bp, Homo sapiens
tgaagtagaggtgcagttaagtggg

SEQ ID NO: 3123 - DNA, 25 bp, Homo sapiens
agtggggggccactagtctaacaga

SEQ ID NO: 3124 - DNA, 25 bp, Homo sapiens
taacagacggtcacaaccagtgcca

SEQ ID NO: 3125 - DNA, 25 bp, Homo sapiens
tcacaaccagtgccatggaaaacca

SEQ ID NO: 3126 - DNA, 25 bp, Homo sapiens
caaaagcagaagttgctagtgacct

SEQ ID NO: 3127 - DNA, 25 bp, Homo sapiens
aaaagcagaagttgctagtgacctt

SEQ ID NO: 3128 - DNA, 25 bp, Homo sapiens
ggaagccgaagctgcttacagtagc

SEQ ID NO: 3129 - DNA, 25 bp, Homo sapiens
gaagccgaagctgcttacagtagct

SEQ ID NO: 3130 - DNA, 25 bp, Homo sapiens
gaaagtcagactaagaaataaagag

SEQ ID NO: 3131 - DNA, 25 bp, Homo sapiens
aaagtcagactaagaaataaagaga

SEQ ID NO: 3132 - DNA, 25 bp, Homo sapiens
tttctgctagccctgagcctatttt

SEQ ID NO: 3133 - DNA, 25 bp, Homo sapiens
tgagcctatttttggaaccagcact

SEQ ID NO: 3134 - DNA, 25 bp, Homo sapiens
gagcctatttttggaaccagcactt

SEQ ID NO: 3135 - DNA, 25 bp, Homo sapiens
agcctatttttggaaccagcacttg

SEQ ID NO: 3136 - DNA, 25 bp, Homo sapiens
agcacttggggaaactgatcttgtg

SEQ ID NO: 3137 - DNA, 25 bp, Homo sapiens
cttggggaaactgatcttgtgagga

SEQ ID NO: 3138 - DNA, 25 bp, Homo sapiens
tgatcttgtgaggatggatgtgttt

SEQ ID NO: 3139 - DNA, 25 bp, Homo sapiens
gatcttgtgaggatggatgtgttta

SEQ ID NO: 3140 - DNA, 25 bp, Homo sapiens
tgaggatggatgtgtttagggacac

SEQ ID NO: 3141 - DNA, 25 bp, Homo sapiens
gaggatggatgtgtttagggacaca

SEQ ID NO: 3142 - DNA, 25 bp, Homo sapiens
gcttttgagagcagcaccaccccac

SEQ ID NO: 3143 - DNA, 25 bp, Homo sapiens
cttttgagagcagcaccaccccact

SEQ ID NO: 3144 - DNA, 25 bp, Homo sapiens
ttttgagagcagcaccaccccactg

SEQ ID NO: 3145 - DNA, 25 bp, Homo sapiens
caccccactggggcatccccagact

SEQ ID NO: 3146 - DNA, 25 bp, Homo sapiens
accccactggggcatccccagactt

SEQ ID NO: 3147 - DNA, 25 bp, Homo sapiens
aaacgtgactctttcttaatgccac

SEQ ID NO: 3148 - DNA, 25 bp, Homo sapiens
aacgtgactctttcttaatgccact

SEQ ID NO: 3149 - DNA, 25 bp, Homo sapiens
ttcttaatgccactgggttttagtc

SEQ ID NO: 3150 - DNA, 25 bp, Homo sapiens
gggttttagtcaggccacagtgaga

SEQ ID NO: 3151 - DNA, 25 bp, Homo sapiens
cacagtgagaaggaacagccctaac

SEQ ID NO: 3152 - DNA, 25 bp, Homo sapiens
gaacagccctaacaggcctccagcc

SEQ ID NO: 3153 - DNA, 25 bp, Homo sapiens
gcctcatatgttgaatcatccagtg

SEQ ID NO: 3154 - DNA, 25 bp, Homo sapiens
gcggatatttcaatgaaaatatcat

SEQ ID NO: 3155 - DNA, 25 bp, Homo sapiens
aaatatcattggttgacttttgtga

SEQ ID NO: 3156 - DNA, 25 bp, Homo sapiens
gacttttgtgatggtaataatgcta

SEQ ID NO: 3157 - DNA, 25 bp, Homo sapiens
ctatggcatctttgccatgaagttg

SEQ ID NO: 3158 - DNA, 25 bp, Homo sapiens
ctttgccatgaagttgtggcctcct

SEQ ID NO: 3159 - DNA, 25 bp, Homo sapiens
tggcctccttggattcttctgactt

SEQ ID NO: 3160 - DNA, 25 bp, Homo sapiens
gattcttctgactttggcttctgaa

SEQ ID NO: 3161 - DNA, 25 bp, Homo sapiens
cttctgactttggcttctgaaagga

SEQ ID NO: 3162 - DNA, 25 bp, Homo sapiens
tgaaaggaaggcctagatccagccc

SEQ ID NO: 3163 - DNA, 25 bp, Homo sapiens
aaggaaggcctagatccagccctgg

SEQ ID NO: 3164 - DNA, 25 bp, Homo sapiens
cagccctggtggtagttcctttctg

SEQ ID NO: 3165 - DNA, 25 bp, Homo sapiens
gaggtctctcagtcccttgagactt

SEQ ID NO: 3166 - DNA, 25 bp, Homo sapiens
aggtctctcagtcccttgagacttt

SEQ ID NO: 3167 - DNA, 25 bp, Homo sapiens
ggtctctcagtcccttgagactttg

SEQ ID NO: 3168 - DNA, 25 bp, Homo sapiens
agtcccttgagactttggggtagtt

SEQ ID NO: 3169 - DNA, 25 bp, Homo sapiens
tgaactttgaattgcttcagaacac

SEQ ID NO: 3170 - DNA, 25 bp, Homo sapiens
tttgaattgcttcagaacacaggtg

SEQ ID NO: 3171 - DNA, 25 bp, Homo sapiens
gcttcagaacacaggtgtggcctga

SEQ ID NO: 3172 - DNA, 25 bp, Homo sapiens
tgtggcctgaaggtattcccttatt

SEQ ID NO: 3173 - DNA, 25 bp, Homo sapiens
gtggcctgaaggtattcccttatta

SEQ ID NO: 3174 - DNA, 25 bp, Homo sapiens
catcgactcattctccattttgctt

SEQ ID NO: 3175 - DNA, 25 bp, Homo sapiens
gttttgtcttgacttgacttgactt

SEQ ID NO: 3176 - DNA, 25 bp, Homo sapiens
ttttgtcttgacttgacttgacttt

SEQ ID NO: 3177 - DNA, 25 bp, Homo sapiens
tttgtcttgacttgacttgactttg

SEQ ID NO: 3178 - DNA, 25 bp, Homo sapiens
ttgtcttgacttgacttgactttgg

SEQ ID NO: 3179 - DNA, 25 bp, Homo sapiens
agatcagttgcttttatactcagaa

SEQ ID NO: 3180 - DNA, 25 bp, Homo sapiens
tactcagaatggaaatacctgatct

SEQ ID NO: 3181 - DNA, 25 bp, Homo sapiens
gatttcatttagatttccctccacg

SEQ ID NO: 3182 - DNA, 25 bp, Homo sapiens
aactatcatgttcttatgtaaactt

SEQ ID NO: 3183 - DNA, 25 bp, Homo sapiens
catgttcttatgtaaacttaggcca

SEQ ID NO: 3184 - DNA, 25 bp, Homo sapiens
caaggccagagttatcatagtccct

SEQ ID NO: 3185 - DNA, 25 bp, Homo sapiens
agttatcatagtccctaggttgcta

SEQ ID NO: 3186 - DNA, 25 bp, Homo sapiens
aggttgctacggcttatcatgtgct

SEQ ID NO: 3187 - DNA, 25 bp, Homo sapiens
tacggcttatcatgtgcttggtaaa

SEQ ID NO: 3188 - DNA, 25 bp, Homo sapiens
catgtgcttggtaaaaggtgatcgc

SEQ ID NO: 3189 - DNA, 25 bp, Homo sapiens
tcagacgagtttactttacatgaga

SEQ ID NO: 3190 - DNA, 25 bp, Homo sapiens
agtttactttacatgagatggaatc

SEQ ID NO: 3191 - DNA, 25 bp, Homo sapiens
ttacatgagatggaatcaggcagag

SEQ ID NO: 3192 - DNA, 25 bp, Homo sapiens
atgagatggaatcaggcagagaggc

SEQ ID NO: 3193 - DNA, 25 bp, Homo sapiens
tgagatggaatcaggcagagaggct

SEQ ID NO: 3194 - DNA, 25 bp, Homo sapiens
gaatcaggcagagaggctgggatga

SEQ ID NO: 3195 - DNA, 25 bp, Homo sapiens
aggctgggatgatggagaaagctcg

SEQ ID NO: 3196 - DNA, 25 bp, Homo sapiens
aggtgaagttttaaaaaaaaagttg

SEQ ID NO: 3197 - DNA, 25 bp, Homo sapiens
aagttttaaaaaaaaagttgtggaa

SEQ ID NO: 3198 - DNA, 25 bp, Homo sapiens
agttgtggaaaggaaagttccaaag

SEQ ID NO: 3199 - DNA, 25 bp, Homo sapiens
tgtggaaaggaaagttccaaagagg

SEQ ID NO: 3200 - DNA, 25 bp, Homo sapiens
gaaagttccaaagaggtggtttctg

SEQ ID NO: 3201 - DNA, 25 bp, Homo sapiens
ggtttctgaggaagtcagagcgccc

SEQ ID NO: 3202 - DNA, 25 bp, Homo sapiens
gtttctgaggaagtcagagcgccca

SEQ ID NO: 3203 - DNA, 25 bp, Homo sapiens
cgcccagggccagagcagtcagtaa

SEQ ID NO: 3204 - DNA, 25 bp, Homo sapiens
gcccagggccagagcagtcagtaat

SEQ ID NO: 3205 - DNA, 25 bp, Homo sapiens
cagagcagtcagtaatgggtgaatg

SEQ ID NO: 3206 - DNA, 25 bp, Homo sapiens
tcagtaatgggtgaatgaggttgtt

SEQ ID NO: 3207 - DNA, 25 bp, Homo sapiens
gggtgaatgaggttgtttggaaagt

SEQ ID NO: 3208 - DNA, 25 bp, Homo sapiens
ttggaaagtcggtgtgacagacaca

SEQ ID NO: 3209 - DNA, 25 bp, Homo sapiens
agacacatggatgccatctacttct

SEQ ID NO: 3210 - DNA, 25 bp, Homo sapiens
tggatgccatctacttctaggttgc

SEQ ID NO: 3211 - DNA, 25 bp, Homo sapiens
atgccatctacttctaggttgctgg

SEQ ID NO: 3212 - DNA, 25 bp, Homo sapiens
tgccatctacttctaggttgctggt

SEQ ID NO: 3213 - DNA, 25 bp, Homo sapiens
atgcacaatattccatagctcactg

SEQ ID NO: 3214 - DNA, 25 bp, Homo sapiens
ctgaggattttaaaattataagcat

SEQ ID NO: 3215 - DNA, 25 bp, Homo sapiens
attataagcataggattttatattt

SEQ ID NO: 3216 - DNA, 25 bp, Homo sapiens
ttataagcataggattttatatttt

SEQ ID NO: 3217 - DNA, 25 bp, Homo sapiens
tataagcataggattttatattttg

SEQ ID NO: 3218 - DNA, 25 bp, Homo sapiens
tatattttggggtgaaagaattatc

SEQ ID NO: 3219 - DNA, 25 bp, Homo sapiens
gggtgaaagaattatctggcacatt

SEQ ID NO: 3220 - DNA, 25 bp, Homo sapiens
aagaattatctggcacattaggtat

SEQ ID NO: 3221 - DNA, 25 bp, Homo sapiens
ataactttttttaaaaaaaactaaa

SEQ ID NO: 3222 - DNA, 25 bp, Homo sapiens
taaaaggcgcttcatgtccagtgtg

SEQ ID NO: 3223 - DNA, 25 bp, Homo sapiens
cagtgtgtggcccttctgaaactta

SEQ ID NO: 3224 - DNA, 25 bp, Homo sapiens
atggtcatctctcccactgaaacca

SEQ ID NO: 3225 - DNA, 25 bp, Homo sapiens
actgaaaccaaggtcttttcaaatg

SEQ ID NO: 3226 - DNA, 25 bp, Homo sapiens
caaggtcttttcaaatgtggctaaa

SEQ ID NO: 3227 - DNA, 25 bp, Homo sapiens
aaggtcttttcaaatgtggctaaat

SEQ ID NO: 3228 - DNA, 25 bp, Homo sapiens
aggtcttttcaaatgtggctaaatg

SEQ ID NO: 3229 - DNA, 25 bp, Homo sapiens
tttcaaatgtggctaaatggggatg

SEQ ID NO: 3230 - DNA, 25 bp, Homo sapiens
gtggctaaatggggatgaggagaca

SEQ ID NO: 3231 - DNA, 25 bp, Homo sapiens
tggctaaatggggatgaggagacac

SEQ ID NO: 3232 - DNA, 25 bp, Homo sapiens
taaatggggatgaggagacacgggt

SEQ ID NO: 3233 - DNA, 25 bp, Homo sapiens
tgaggagacacgggtaggactttct

SEQ ID NO: 3234 - DNA, 25 bp, Homo sapiens
cattctttaaagagccaagttgctt

SEQ ID NO: 3235 - DNA, 25 bp, Homo sapiens
attctttaaagagccaagttgcttc

SEQ ID NO: 3236 - DNA, 25 bp, Homo sapiens
ttctttaaagagccaagttgcttcg

SEQ ID NO: 3237 - DNA, 25 bp, Homo sapiens
gccaagttgcttcggggaaacagcc

SEQ ID NO: 3238 - DNA, 25 bp, Homo sapiens
tgcttcggggaaacagccaggaaaa

SEQ ID NO: 3239 - DNA, 25 bp, Homo sapiens
ggaaaatggtcaagattatttttag

SEQ ID NO: 3240 - DNA, 25 bp, Homo sapiens
agattatttttagaggttattttat

SEQ ID NO: 3241 - DNA, 25 bp, Homo sapiens
gattatttttagaggttattttatt

SEQ ID NO: 3242 - DNA, 25 bp, Homo sapiens
attatttttagaggttattttattg

SEQ ID NO: 3243 - DNA, 25 bp, Homo sapiens
taacatcttgagttatttttaattc

SEQ ID NO: 3244 - DNA, 25 bp, Homo sapiens
aacatcttgagttatttttaattca

SEQ ID NO: 3245 - DNA, 25 bp, Homo sapiens
acatcttgagttatttttaattcag

SEQ ID NO: 3246 - DNA, 25 bp, Homo sapiens
catcttgagttatttttaattcagg

SEQ ID NO: 3247 - DNA, 25 bp, Homo sapiens
gagttatttttaattcagggggatg

SEQ ID NO: 3248 - DNA, 25 bp, Homo sapiens
atttttaattcagggggatgtggaa

SEQ ID NO: 3249 - DNA, 25 bp, Homo sapiens
gttttgttgtagcttagtatccata

SEQ ID NO: 3250 - DNA, 25 bp, Homo sapiens
ttttgttgtagcttagtatccataa

SEQ ID NO: 3251 - DNA, 25 bp, Homo sapiens
gcagcttttgttttctgtatgttgt

SEQ ID NO: 3252 - DNA, 25 bp, Homo sapiens
cagcttttgttttctgtatgttgtt

SEQ ID NO: 3253 - DNA, 25 bp, Homo sapiens
agcttttgttttctgtatgttgttg

SEQ ID NO: 3254 - DNA, 25 bp, Homo sapiens
gcttttgttttctgtatgttgttgg

SEQ ID NO: 3255 - DNA, 25 bp, Homo sapiens
tcaactttcacacatagcaagcaca

SEQ ID NO: 3256 - DNA, 25 bp, Homo sapiens
gcaagcacatggcctccctgatgtc

SEQ ID NO: 3257 - DNA, 25 bp, Homo sapiens
tccctgatgtcaggatgcctttgtt

SEQ ID NO: 3258 - DNA, 25 bp, Homo sapiens
ctaaaaatttgttcctttttcacta

SEQ ID NO: 3259 - DNA, 25 bp, Homo sapiens
taaaaatttgttcctttttcactat

SEQ ID NO: 3260 - DNA, 25 bp, Homo sapiens
tttttcactatgggcagttcacaca

SEQ ID NO: 3261 - DNA, 25 bp, Homo sapiens
cacaaggcaaaaactattgaacagt

SEQ ID NO: 3262 - DNA, 25 bp, Homo sapiens
tgattcttttattaataaaagctaa

SEQ ID NO: 3263 - DNA, 25 bp, Homo sapiens
gattcttttattaataaaagctaat

SEQ ID NO: 3264 - DNA, 25 bp, Homo sapiens
tttattaataaaagctaatgggaaa

SEQ ID NO: 3265 - DNA, 25 bp, Homo sapiens
tttattgataaatctatcctttaaa

SEQ ID NO: 3266 - DNA, 25 bp, Homo sapiens
ctatcctttaaaaggaatacgtttt

SEQ ID NO: 3267 - DNA, 25 bp, Homo sapiens
aatagtttatgtagagaaacattag

SEQ ID NO: 3268 - DNA, 25 bp, Homo sapiens
ttaattgtctccccacctatattta

SEQ ID NO: 3269 - DNA, 25 bp, Homo sapiens
taattgtctccccacctatatttat

SEQ ID NO: 3270 - DNA, 25 bp, Homo sapiens
agtaaaagtgtatttgtaaactgta

SEQ ID NO: 3271 - DNA, 25 bp, Homo sapiens
gtaaaagtgtatttgtaaactgtat

SEQ ID NO: 3272 - DNA, 25 bp, Homo sapiens
gtaaactgtatgggaactaaaaatt

SEQ ID NO: 3273 - DNA, 25 bp, Homo sapiens
ggaataaaaccattttcttatatga

SEQ ID NO: 3274 - DNA, 25 bp, Homo sapiens
gggagagggtgaaagtccacatctg

SEQ ID NO: 3275 - DNA, 25 bp, Homo sapiens
agggagagggtgaaagtccacatct

SEQ ID NO: 3276 - DNA, 25 bp, Homo sapiens
tagggagagggtgaaagtccacatc

SEQ ID NO: 3277 - DNA, 25 bp, Homo sapiens
tctgttcttgatctttttagggaga

SEQ ID NO: 3278 - DNA, 25 bp, Homo sapiens
gtctgttcttgatctttttagggag

SEQ ID NO: 3279 - DNA, 25 bp, Homo sapiens
cttgcgtctgttcttgatcttttta

SEQ ID NO: 3280 - DNA, 25 bp, Homo sapiens
tcttgcgtctgttcttgatcttttt

SEQ ID NO: 3281 - DNA, 25 bp, Homo sapiens
atggtttcaaattttgcttatcaaa

SEQ ID NO: 3282 - DNA, 25 bp, Homo sapiens
gagttaaaatacagtggtctttaaa

SEQ ID NO: 3283 - DNA, 25 bp, Homo sapiens
caggtattgttgagttaaaatacag

SEQ ID NO: 3284 - DNA, 25 bp, Homo sapiens
ctgaggaaatgagtaattgggaagc

SEQ ID NO: 3285 - DNA, 25 bp, Homo sapiens
ttcttatctgaggaaatgagtaatt

SEQ ID NO: 3286 - DNA, 25 bp, Homo sapiens
cttcttatctgaggaaatgagtaat

SEQ ID NO: 3287 - DNA, 25 bp, Homo sapiens
tgtagagatgatttcttcttatctg

SEQ ID NO: 3288 - DNA, 25 bp, Homo sapiens
ggaaaaaaaaaattaaactggttaa

SEQ ID NO: 3289 - DNA, 25 bp, Homo sapiens
aggaaaaaaaaaattaaactggtta

SEQ ID NO: 3290 - DNA, 25 bp, Homo sapiens
acaatgaggaaaaaaaaaattaaac

SEQ ID NO: 3291 - DNA, 25 bp, Homo sapiens
tttcttctcatcatccccaacaatg

SEQ ID NO: 3292 - DNA, 25 bp, Homo sapiens
taaatgagattgttctcacttttct

SEQ ID NO: 3293 - DNA, 25 bp, Homo sapiens
gaattatccactactggatacatga

SEQ ID NO: 3294 - DNA, 25 bp, Homo sapiens
gccatcaaaatgaattatccactac

SEQ ID NO: 3295 - DNA, 25 bp, Homo sapiens
ctcaggcactggcttaattctcatt

SEQ ID NO: 3296 - DNA, 25 bp, Homo sapiens
gtcaacttctgacagtctcaggcac

SEQ ID NO: 3297 - DNA, 25 bp, Homo sapiens
gcaaaggtcaacttctgacagtctc

SEQ ID NO: 3298 - DNA, 25 bp, Homo sapiens
ctatgactctttaatgccagtgcaa

SEQ ID NO: 3299 - DNA, 25 bp, Homo sapiens
agccgaactataattggtcaacggc

SEQ ID NO: 3300 - DNA, 25 bp, Homo sapiens
caacagccgaactataattggtcaa

SEQ ID NO: 3301 - DNA, 25 bp, Homo sapiens
tctcagtcaacagccgaactataat

SEQ ID NO: 3302 - DNA, 25 bp, Homo sapiens
caattattcaaatgcaaagaaaata

SEQ ID NO: 3303 - DNA, 25 bp, Homo sapiens
tcgttgttttggcgaccaaaaacac

SEQ ID NO: 3304 - DNA, 25 bp, Homo sapiens
aaccctattcaaacagtcgttgttt

SEQ ID NO: 3305 - DNA, 25 bp, Homo sapiens
ccaaaaaaattcggtgatttcaaaa

SEQ ID NO: 3306 - DNA, 25 bp, Homo sapiens
tccaaaaaaattcggtgatttcaaa

SEQ ID NO: 3307 - DNA, 25 bp, Homo sapiens
gagtctaactgattgtcaacccccg

SEQ ID NO: 3308 - DNA, 25 bp, Homo sapiens
ggtcgagtctaactgattgtcaacc

SEQ ID NO: 3309 - DNA, 25 bp, Homo sapiens
gggtcgagtctaactgattgtcaac

SEQ ID NO: 3310 - DNA, 25 bp, Homo sapiens
cgggtcgagtctaactgattgtcaa

SEQ ID NO: 3311 - DNA, 25 bp, Homo sapiens
tcgggtcgagtctaactgattgtca

SEQ ID NO: 3312 - DNA, 25 bp, Homo sapiens
tggtgtactcaccggtggacgtccg

SEQ ID NO: 3313 - DNA, 25 bp, Homo sapiens
cgactggtgtactcaccggtggacg

SEQ ID NO: 3314 - DNA, 25 bp, Homo sapiens
aggcggctggacgactggtgtactc

SEQ ID NO: 3315 - DNA, 25 bp, Homo sapiens
gcttcttcctctctgagtcctgacg

SEQ ID NO: 3316 - DNA, 25 bp, Homo sapiens
tctgatgtgcttcttcctctctgag

SEQ ID NO: 3317 - DNA, 25 bp, Homo sapiens
cggtgactttctctgatgtgcttct

SEQ ID NO: 3318 - DNA, 25 bp, Homo sapiens
ctctccagatcgatgggacggtcgg

SEQ ID NO: 3319 - DNA, 25 bp, Homo sapiens
aaccctcgagactcgacgtacactc

SEQ ID NO: 3320 - DNA, 25 bp, Homo sapiens
accggtaaagacgaaaactcgagaa

SEQ ID NO: 3321 - DNA, 25 bp, Homo sapiens
gaccggtaaagacgaaaactcgaga

SEQ ID NO: 3322 - DNA, 25 bp, Homo sapiens
agacctgaattcaaaagtcttccgg

SEQ ID NO: 3323 - DNA, 25 bp, Homo sapiens
tgttaagacctgaattcaaaagtct

SEQ ID NO: 3324 - DNA, 25 bp, Homo sapiens
tcatcttccctgtgacactgttaag

SEQ ID NO: 3325 - DNA, 25 bp, Homo sapiens
agtagtagttatctcccttcatctt

SEQ ID NO: 3326 - DNA, 25 bp, Homo sapiens
tagtagtagttatctcccttcatct

SEQ ID NO: 3327 - DNA, 25 bp, Homo sapiens
gtagtagtagtagtagtagttatct

SEQ ID NO: 3328 - DNA, 25 bp, Homo sapiens
agtagtagtagtagtagtagttatc

SEQ ID NO: 3329 - DNA, 25 bp, Homo sapiens
cgaacactgaacaaatcattcatct

SEQ ID NO: 3330 - DNA, 25 bp, Homo sapiens
ccgaacactgaacaaatcattcatc

SEQ ID NO: 3331 - DNA, 25 bp, Homo sapiens
gtgtgggaaaagaacttagactcga

SEQ ID NO: 3332 - DNA, 25 bp, Homo sapiens
agtgtgggaaaagaacttagactcg

SEQ ID NO: 3333 - DNA, 25 bp, Homo sapiens
tggttgtgaccgtctgttagactag

SEQ ID NO: 3334 - DNA, 25 bp, Homo sapiens
taatatccttggttttccatggcac

SEQ ID NO: 3335 - DNA, 25 bp, Homo sapiens
ttttgctaatatccttggttttcca

SEQ ID NO: 3336 - DNA, 25 bp, Homo sapiens
caacttctgcttttgctaatatcct

SEQ ID NO: 3337 - DNA, 25 bp, Homo sapiens
tactgtaagcagcttcggcttccca

SEQ ID NO: 3338 - DNA, 25 bp, Homo sapiens
ttgtcccagctactgtaagcagctt

SEQ ID NO: 3339 - DNA, 25 bp, Homo sapiens
agaaatcattcaggaagcttcttga

SEQ ID NO: 3340 - DNA, 25 bp, Homo sapiens
ggctcagggctagcagaaatcattc

SEQ ID NO: 3341 - DNA, 25 bp, Homo sapiens
agtgctggttccaaaaataggctca

SEQ ID NO: 3342 - DNA, 25 bp, Homo sapiens
aagtgctggttccaaaaataggctc

SEQ ID NO: 3343 - DNA, 25 bp, Homo sapiens
ttccccaagtgctggttccaaaaat

SEQ ID NO: 3344 - DNA, 25 bp, Homo sapiens
tcacaagatcagtttccccaagtgc

SEQ ID NO: 3345 - DNA, 25 bp, Homo sapiens
caagtctggggatgccccagtgggg

SEQ ID NO: 3346 - DNA, 25 bp, Homo sapiens
tcccaagtctggggatgccccagtg

SEQ ID NO: 3347 - DNA, 25 bp, Homo sapiens
ttcccaagtctggggatgccccagt

SEQ ID NO: 3348 - DNA, 25 bp, Homo sapiens
tttcccaagtctggggatgccccag

SEQ ID NO: 3349 - DNA, 25 bp, Homo sapiens
gaaagagtcacgtttcccaagtctg

SEQ ID NO: 3350 - DNA, 25 bp, Homo sapiens
agaaagagtcacgtttcccaagtct

SEQ ID NO: 3351 - DNA, 25 bp, Homo sapiens
aagaaagagtcacgtttcccaagtc

SEQ ID NO: 3352 - DNA, 25 bp, Homo sapiens
tcactgtggcctgactaaaacccag

SEQ ID NO: 3353 - DNA, 25 bp, Homo sapiens
ctgttagggctgttccttctcactg

SEQ ID NO: 3354 - DNA, 25 bp, Homo sapiens
attcaacctggctggaggcctgtta

SEQ ID NO: 3355 - DNA, 25 bp, Homo sapiens
cattcaacctggctggaggcctgtt

SEQ ID NO: 3356 - DNA, 25 bp, Homo sapiens
aaatgagctcattcaacctggctgg

SEQ ID NO: 3357 - DNA, 25 bp, Homo sapiens
caaaaatgagctcattcaacctggc

SEQ ID NO: 3358 - DNA, 25 bp, Homo sapiens
acaacaaaaatgagctcattcaacc

SEQ ID NO: 3359 - DNA, 25 bp, Homo sapiens
tagaacattagcaaatcttactggt

SEQ ID NO: 3360 - DNA, 25 bp, Homo sapiens
aatgtagaacattagcaaatcttac

SEQ ID NO: 3361 - DNA, 25 bp, Homo sapiens
aggcaaagagggatgtctttggaga

SEQ ID NO: 3362 - DNA, 25 bp, Homo sapiens
catatgaggcaaagagggatgtctt

SEQ ID NO: 3363 - DNA, 25 bp, Homo sapiens
gatgattcaacatatgaggcaaaga

SEQ ID NO: 3364 - DNA, 25 bp, Homo sapiens
ggatgattcaacatatgaggcaaag

SEQ ID NO: 3365 - DNA, 25 bp, Homo sapiens
tccgcactggatgattcaacatatg

SEQ ID NO: 3366 - DNA, 25 bp, Homo sapiens
gatattttcattgaaatatccgcac

SEQ ID NO: 3367 - DNA, 25 bp, Homo sapiens
agaatccaaggaggccacaacttca

SEQ ID NO: 3368 - DNA, 25 bp, Homo sapiens
aagccaaagtcagaagaatccaagg

SEQ ID NO: 3369 - DNA, 25 bp, Homo sapiens
cagaagccaaagtcagaagaatcca

SEQ ID NO: 3370 - DNA, 25 bp, Homo sapiens
aggaactaccaccagggctggatct

SEQ ID NO: 3371 - DNA, 25 bp, Homo sapiens
ctcagaaaggaactaccaccagggc

SEQ ID NO: 3372 - DNA, 25 bp, Homo sapiens
agacctcagaaaggaactaccacca

SEQ ID NO: 3373 - DNA, 25 bp, Homo sapiens
gagacctcagaaaggaactaccacc

SEQ ID NO: 3374 - DNA, 25 bp, Homo sapiens
ctcaagggactgagagacctcagaa

SEQ ID NO: 3375 - DNA, 25 bp, Homo sapiens
cagccaaactaccccaaagtctcaa

SEQ ID NO: 3376 - DNA, 25 bp, Homo sapiens
gcagccaaactaccccaaagtctca

SEQ ID NO: 3377 - DNA, 25 bp, Homo sapiens
ctgatatacattttgtcagtgagaa

SEQ ID NO: 3378 - DNA, 25 bp, Homo sapiens
aaggaatattggggggtggaggtgg

SEQ ID NO: 3379 - DNA, 25 bp, Homo sapiens
caaggaatattggggggtggaggtg

SEQ ID NO: 3380 - DNA, 25 bp, Homo sapiens
tcaaggaatattggggggtggaggt

SEQ ID NO: 3381 - DNA, 25 bp, Homo sapiens
ttcaaggaatattggggggtggagg

SEQ ID NO: 3382 - DNA, 25 bp, Homo sapiens
aagttcaaggaatattggggggtgg

SEQ ID NO: 3383 - DNA, 25 bp, Homo sapiens
tcaaagttcaaggaatattgggggg

SEQ ID NO: 3384 - DNA, 25 bp, Homo sapiens
aattcaaagttcaaggaatattggg

SEQ ID NO: 3385 - DNA, 25 bp, Homo sapiens
caattcaaagttcaaggaatattgg

SEQ ID NO: 3386 - DNA, 25 bp, Homo sapiens
gcaattcaaagttcaaggaatattg

SEQ ID NO: 3387 - DNA, 25 bp, Homo sapiens
agcaattcaaagttcaaggaatatt

SEQ ID NO: 3388 - DNA, 25 bp, Homo sapiens
aagcaattcaaagttcaaggaatat

SEQ ID NO: 3389 - DNA, 25 bp, Homo sapiens
gtgttctgaagcaattcaaagttca

SEQ ID NO: 3390 - DNA, 25 bp, Homo sapiens
acttccctaataagggaataccttc

SEQ ID NO: 3391 - DNA, 25 bp, Homo sapiens
gacagcagtgacacttccctaataa

SEQ ID NO: 3392 - DNA, 25 bp, Homo sapiens
agacagcagtgacacttccctaata

SEQ ID NO: 3393 - DNA, 25 bp, Homo sapiens
aagcttcttgctgcaaatactgaac

SEQ ID NO: 3394 - DNA, 25 bp, Homo sapiens
aagtcaagacaaaaccaaagcaaaa

SEQ ID NO: 3395 - DNA, 25 bp, Homo sapiens
tttgtacaatcaaactcttgtgtgc

SEQ ID NO: 3396 - DNA, 25 bp, Homo sapiens
ataaaagcaactgatcttaagcaac

SEQ ID NO: 3397 - DNA, 25 bp, Homo sapiens
tcttataacaaaactagccaagatc

SEQ ID NO: 3398 - DNA, 25 bp, Homo sapiens
catgatagtttgctgacctcgtgga

SEQ ID NO: 3399 - DNA, 25 bp, Homo sapiens
acatgatagtttgctgacctcgtgg

SEQ ID NO: 3400 - DNA, 25 bp, Homo sapiens
agaacatgatagtttgctgacctcg

SEQ ID NO: 3401 - DNA, 25 bp, Homo sapiens
ctagggactatgataactctggcct

SEQ ID NO: 3402 - DNA, 25 bp, Homo sapiens
agcaacctagggactatgataactc

SEQ ID NO: 3403 - DNA, 25 bp, Homo sapiens
gcacatgataagccgtagcaaccta

SEQ ID NO: 3404 - DNA, 25 bp, Homo sapiens
agcacatgataagccgtagcaacct

SEQ ID NO: 3405 - DNA, 25 bp, Homo sapiens
ctgacttcctcagaaaccacctctt

SEQ ID NO: 3406 - DNA, 25 bp, Homo sapiens
acccattactgactgctctggccct

SEQ ID NO: 3407 - DNA, 25 bp, Homo sapiens
cacccattactgactgctctggccc

SEQ ID NO: 3408 - DNA, 25 bp, Homo sapiens
ctcattcacccattactgactgctc

SEQ ID NO: 3409 - DNA, 25 bp, Homo sapiens
tacccaccagcaacctagaagtaga

SEQ ID NO: 3410 - DNA, 25 bp, Homo sapiens
taattttaaaatcctcagtgagcta

SEQ ID NO: 3411 - DNA, 25 bp, Homo sapiens
aaaaagttattaagactgtgaaatt

SEQ ID NO: 3412 - DNA, 25 bp, Homo sapiens
cataagtttcagaagggccacacac

SEQ ID NO: 3413 - DNA, 25 bp, Homo sapiens
ggagagatgaccataagtttcagaa

SEQ ID NO: 3414 - DNA, 25 bp, Homo sapiens
gggagagatgaccataagtttcaga

SEQ ID NO: 3415 - DNA, 25 bp, Homo sapiens
catttgaaaagaccttggtttcagt

SEQ ID NO: 3416 - DNA, 25 bp, Homo sapiens
acatttgaaaagaccttggtttcag

SEQ ID NO: 3417 - DNA, 25 bp, Homo sapiens
catttagccacatttgaaaagacct

SEQ ID NO: 3418 - DNA, 25 bp, Homo sapiens
tcctggctgtttccccgaagcaact

SEQ ID NO: 3419 - DNA, 25 bp, Homo sapiens
ctaaaaataatcttgaccattttcc

SEQ ID NO: 3420 - DNA, 25 bp, Homo sapiens
atgtctatagtctaagtttccctta

SEQ ID NO: 3421 - DNA, 25 bp, Homo sapiens
aacatacagaaaacaaaagctgcac

SEQ ID NO: 3422 - DNA, 25 bp, Homo sapiens
taacaaaggcatcctgacatcaggg

SEQ ID NO: 3423 - DNA, 25 bp, Homo sapiens
tcctaacaaaggcatcctgacatca

SEQ ID NO: 3424 - DNA, 25 bp, Homo sapiens
atcctaacaaaggcatcctgacatc

SEQ ID NO: 3425 - DNA, 25 bp, Homo sapiens
taagggcaaatacagatcctaacaa

SEQ ID NO: 3426 - DNA, 25 bp, Homo sapiens
ggaaaaaagatttcaacaaaattaa

SEQ ID NO: 3427 - DNA, 25 bp, Homo sapiens
aggaaaaaagatttcaacaaaatta

SEQ ID NO: 3428 - DNA, 25 bp, Homo sapiens
attttggaacttttcaagaggaaga

SEQ ID NO: 3429 - DNA, 25 bp, Homo sapiens
aaactatattttggaacttttcaag

SEQ ID NO: 3430 - DNA, 25 bp, Homo sapiens
atgaaagatacaataaactatattt

SEQ ID NO: 3431 - DNA, 25 bp, Homo sapiens
ttgtgtgaactgcccatagtgaaaa

SEQ ID NO: 3432 - DNA, 25 bp, Homo sapiens
ttattaattacatgatttgaggctt

SEQ ID NO: 3433 - DNA, 25 bp, Homo sapiens
ggcaaattattaattacatgatttg

SEQ ID NO: 3434 - DNA, 25 bp, Homo sapiens
aatcacaattaggtcataaataaac

SEQ ID NO: 3435 - DNA, 25 bp, Homo sapiens
ttttattaataaaagaatcacaatt

SEQ ID NO: 3436 - DNA, 25 bp, Homo sapiens
gtaggtctagtcatcagcttaatca

SEQ ID NO: 3437 - DNA, 25 bp, Homo sapiens
tgtaggtctagtcatcagcttaatc

SEQ ID NO: 3438 - DNA, 25 bp, Homo sapiens
catatactgcaggaaaattaattgt

SEQ ID NO: 3439 - DNA, 25 bp, Homo sapiens
tctggtacaatacttcatatactgc

SEQ ID NO: 3440 - DNA, 25 bp, Homo sapiens
aaatattacatatcttttaatactc

SEQ ID NO: 3441 - DNA, 25 bp, Homo sapiens
acatcctaaaacgtattccttttaa

SEQ ID NO: 3442 - DNA, 25 bp, Homo sapiens
gactacataatatacgtgggcaaaa

SEQ ID NO: 3443 - DNA, 25 bp, Homo sapiens
tgcaaatagactacataatatacgt

SEQ ID NO: 3444 - DNA, 25 bp, Homo sapiens
ttgcaaatagactacataatatacg

SEQ ID NO: 3445 - DNA, 25 bp, Homo sapiens
gcgctaacacccataaatataggtg

SEQ ID NO: 3446 - DNA, 25 bp, Homo sapiens
tgcgctaacacccataaatataggt

SEQ ID NO: 3447 - DNA, 25 bp, Homo sapiens
ttgcgctaacacccataaatatagg

SEQ ID NO: 3448 - DNA, 25 bp, Homo sapiens
cagttgcgctaacacccataaatat

SEQ ID NO: 3449 - DNA, 25 bp, Homo sapiens
cgacaaatgccatcatataagaaaa
